United States Patent Application Publication US 2011/0165568 A1 - sequence listing, part 6

SEQ ID NO: 1695 - DNA, 5076356 bp, Escherichia coli (residues 3,807,268-5,076,356 of 5,076,356)
  Strain O55:H7
  modified_base (225)..(225): a, c, g or t
  modified_base (1111)..(1112): a, c, g or t
  modified_base (1607)..(1622): a, c, g or t
  modified_base (4457)..(4460): a, c, g or t
  modified_base (6633)..(6633): a, c, g or t
  modified_base (7135)..(7139): a, c, g or t
  modified_base (11714)..(11714): a, c, g or t
  modified_base (12007)..(12009): a, c, g or t
  modified_base (12012)..(12013): a, c, g or t
  modified_base (13584)..(13585): a, c, g or t
  modified_base (15530)..(15530): a, c, g or t
  modified_base (15818)..(15821): a, c, g or t
  modified_base (18780)..(18789): a, c, g or t
  modified_base (19304)..(19308): a, c, g or t
  modified_base (19732)..(19743): a, c, g or t
  modified_base (24367)..(24373): a, c, g or t
  modified_base (24782)..(24785): a, c, g or t
  modified_base (25579)..(25595): a, c, g or t
  modified_base (28480)..(28480): a, c, g or t
  modified_base (29283)..(29286): a, c, g or t
  modified_base (29291)..(29295): a, c, g or t
  modified_base (31649)..(31652): a, c, g or t
  modified_base (34426)..(34426): a, c, g or t
  modified_base (36376)..(36379): a, c, g or t
  modified_base (36381)..(36384): a, c, g or t
  modified_base (36889)..(36889): a, c, g or t
  modified_base (39884)..(39884): a, c, g or t
  modified_base (45140)..(45140): a, c, g or t
  modified_base (45551)..(45551): a, c, g or t
  modified_base (45915)..(45920): a, c, g or t
  modified_base (46403)..(46407): a, c, g or t
  modified_base (48459)..(48459): a, c, g or t
  modified_base (49809)..(49809): a, c, g or t
  modified_base (50356)..(50356): a, c, g or t
  modified_base (52612)..(52612): a, c, g or t
  modified_base (56077)..(56077): a, c, g or t
  modified_base (58998)..(58998): a, c, g or t
  modified_base (62027)..(62027): a, c, g or t
  modified_base (64105)..(64108): a, c, g or t
  modified_base (64241)..(64241): a, c, g or t
  modified_base (67678)..(67678): a, c, g or t
  modified_base (67797)..(67801): a, c, g or t
  modified_base (71722)..(71722): a, c, g or t
  modified_base (73394)..(73397): a, c, g or t
  modified_base (73688)..(73688): a, c, g or t
  modified_base (74659)..(74659): a, c, g or t
  modified_base (87797)..(87797): a, c, g or t
  modified_base (97642)..(97646): a, c, g or t
  modified_base (98093)..(98093): a, c, g or t
  modified_base (98096)..(98096): a, c, g or t
  modified_base (102287)..(102287): a, c, g or t
  modified_base (105479)..(105479): a, c, g or t
  modified_base (106453)..(106455): a, c, g or t
  modified_base (106458)..(106459): a, c, g or t
  modified_base (109656)..(109657): a, c, g or t
  modified_base (123248)..(123250): a, c, g or t
  modified_base (126289)..(126299): a, c, g or t
  modified_base (129221)..(129221): a, c, g or t
  modified_base (130490)..(130493): a, c, g or t
  modified_base (130923)..(130926): a, c, g or t
  modified_base (135751)..(135751): a, c, g or t
  modified_base (137716)..(137716): a, c, g or t
  modified_base (140865)..(140865): a, c, g or t
  modified_base (143774)..(143777): a, c, g or t
  modified_base (147543)..(147546): a, c, g or t
  modified_base (149125)..(149125): a, c, g or t
  modified_base (151097)..(151098): a, c, g or t
  modified_base (156722)..(156722): a, c, g or t
  modified_base (157927)..(157927): a, c, g or t
  modified_base (159008)..(159008): a, c, g or t
  modified_base (162533)..(162533): a, c, g or t
  modified_base (163259)..(163259): a, c, g or t
  modified_base (163398)..(163398): a, c, g or t
  modified_base (165153)..(165153): a, c, g or t
  modified_base (167388)..(167388): a, c, g or t
  modified_base (175680)..(175681): a, c, g or t
  modified_base (175684)..(175684): a, c, g or t
  modified_base (175965)..(175965): a, c, g or t
  modified_base (177693)..(177693): a, c, g or t
  modified_base (177719)..(177722): a, c, g or t
  modified_base (177724)..(177725): a, c, g or t
  modified_base (179857)..(179870): a, c, g or t
  modified_base (179961)..(179961): a, c, g or t
  modified_base (180353)..(180353): a, c, g or t
  modified_base (190146)..(190149): a, c, g or t
  modified_base (191703)..(191703): a, c, g or t
  modified_base (195215)..(195223): a, c, g or t
  modified_base (198174)..(198174): a, c, g or t
  modified_base (198179)..(198179): a, c, g or t
  modified_base (204512)..(204515): a, c, g or t
  modified_base (205797)..(205804): a, c, g or t
  modified_base (207917)..(207917): a, c, g or t
  modified_base (210045)..(210045): a, c, g or t
  modified_base (210819)..(210819): a, c, g or t
  modified_base (212694)..(212694): a, c, g or t
  modified_base (212776)..(212776): a, c, g or t
  modified_base (212965)..(212965): a, c, g or t
  modified_base (214546)..(214549): a, c, g or t
  modified_base (216428)..(216433): a, c, g or t
  modified_base (218731)..(218731): a, c, g or t
  modified_base (228787)..(228788): a, c, g or t
  modified_base (228790)..(228791): a, c, g or t
  modified_base (229036)..(229037): a, c, g or t
  modified_base (229040)..(229069): a, c, g or t
  modified_base (229154)..(229168): a, c, g or t
  modified_base (229208)..(229208): a, c, g or t
  modified_base (229215)..(229226): a, c, g or t
  modified_base (229412)..(229412): a, c, g or t
  modified_base (229728)..(229736): a, c, g or t
  modified_base (229739)..(229742): a, c, g or t
  modified_base (229828)..(229831): a, c, g or t
  modified_base (230070)..(230078): a, c, g or t
  modified_base (230311)..(230311): a, c, g or t
  modified_base (231196)..(231196): a, c, g or t
  modified_base (237010)..(237013): a, c, g or t
  modified_base (240337)..(240337): a, c, g or t
  modified_base (240732)..(240732): a, c, g or t
  modified_base (240744)..(240744): a, c, g or t
  modified_base (243277)..(243289): a, c, g or t
  modified_base (243525)..(243525): a, c, g or t
  modified_base (243527)..(243528): a, c, g or t
  modified_base (243532)..(243532): a, c, g or t
  modified_base (245081)..(245081): a, c, g or t
  modified_base (247553)..(247553): a, c, g or t
  modified_base (247879)..(247879): a, c, g or t
  modified_base (248819)..(248830): a, c, g or t
  modified_base (253042)..(253042): a, c, g or t
  modified_base (255707)..(255716): a, c, g or t
  modified_base (255719)..(255719): a, c, g or t
  modified_base (256708)..(256711): a, c, g or t
  modified_base (260660)..(260660): a, c, g or t
  modified_base (261192)..(261193): a, c, g or t
  modified_base (261196)..(261197): a, c, g or t
  modified_base (261199)..(261199): a, c, g or t
  modified_base (261205)..(261206): a, c, g or t
  modified_base (261208)..(261210): a, c, g or t
  modified_base (261940)..(261941): a, c, g or t
  modified_base (266146)..(266146): a, c, g or t
  modified_base (267741)..(267741): a, c, g or t
  modified_base (267796)..(267797): a, c, g or t
  modified_base (268132)..(268141): a, c, g or t
  modified_base (268537)..(268540): a, c, g or t
  modified_base (268542)..(268542): a, c, g or t
  modified_base (268544)..(268547): a, c, g or t
  modified_base (269632)..(269634): a, c, g or t
  modified_base (269812)..(269812): a, c, g or t
  modified_base (269863)..(269863): a, c, g or t
  modified_base (269872)..(269872): a, c, g or t
  modified_base (269914)..(269914): a, c, g or t
  modified_base (269956)..(269956): a, c, g or t
  modified_base (269971)..(269971): a, c, g or t
  modified_base (270076)..(270076): a, c, g or t
  modified_base (270552)..(270552): a, c, g or t
  modified_base (270736)..(270736): a, c, g or t
  modified_base (271053)..(271060): a, c, g or t
  modified_base (271415)..(271416): a, c, g or t
  modified_base (271418)..(271420): a, c, g or t
  modified_base (271424)..(271425): a, c, g or t
  modified_base (272354)..(272367): a, c, g or t
  modified_base (273879)..(273879): a, c, g or t
  modified_base (274206)..(274206): a, c, g or t
  modified_base (274218)..(274218): a, c, g or t
  modified_base (274262)..(274263): a, c, g or t
  modified_base (274268)..(274277): a, c, g or t
  modified_base (274290)..(274290): a, c, g or t
  modified_base (274520)..(274520): a, c, g or t
  modified_base (276072)..(276072): a, c, g or t
  modified_base (277861)..(277862): a, c, g or t
  modified_base (278820)..(278835): a, c, g or t
  modified_base (282709)..(282714): a, c, g or t
  modified_base (282716)..(282721): a, c, g or t
  modified_base (283381)..(283381): a, c, g or t
  modified_base (283843)..(283843): a, c, g or t
  modified_base (284031)..(284031): a, c, g or t
  modified_base (284034)..(284037): a, c, g or t
  modified_base (284549)..(284552): a, c, g or t
  modified_base (284555)..(284555): a, c, g or t
  modified_base (284906)..(284906): a, c, g or t
  modified_base (285347)..(285348): a, c, g or t
  modified_base (285435)..(285435): a, c, g or t
  modified_base (286072)..(286072): a, c, g or t
  modified_base (286092)..(286092): a, c, g or t
  modified_base (286347)..(286350): a, c, g or t
  modified_base (286488)..(286488): a, c, g or t
  modified_base (286495)..(286495): a, c, g or t
  modified_base (287082)..(287085): a, c, g or t
  modified_base (292203)..(292203): a, c, g or t
  modified_base (294246)..(294246): a, c, g or t
  modified_base (294298)..(294299): a, c, g or t
  modified_base (295226)..(295226): a, c, g or t
  modified_base (295860)..(295869): a, c, g or t
  modified_base (295871)..(295871): a, c, g or t
  modified_base (296561)..(296564): a, c, g or t
  modified_base (296724)..(296724): a, c, g or t
  modified_base (296941)..(296944): a, c, g or t
  modified_base (297024)..(297027): a, c, g or t
  modified_base (298421)..(298421): a, c, g or t
  modified_base (298681)..(298681): a, c, g or t
  modified_base (304726)..(304727): a, c, g or t
  modified_base (304729)..(304731): a, c, g or t
  modified_base (304734)..(304737): a, c, g or t
  modified_base (304763)..(304773): a, c, g or t
  modified_base (304775)..(304776): a, c, g or t
  modified_base (304890)..(304912): a, c, g or t
  modified_base (304916)..(304917): a, c, g or t
  modified_base (304963)..(304971): a, c, g or t
  modified_base (305015)..(305024): a, c, g or t
  modified_base (305072)..(305073): a, c, g or t
  modified_base (305152)..(305179): a, c, g or t
  modified_base (305204)..(305218): a, c, g or t
  modified_base (305263)..(305273): a, c, g or t
  modified_base (305275)..(305276): a, c, g or t
  modified_base (305280)..(305281): a, c, g or t
  modified_base (305343)..(305364): a, c, g or t
  modified_base (305399)..(305414): a, c, g or t
  modified_base (305416)..(305417): a, c, g or t
  modified_base (305464)..(305639): a, c, g or t
  modified_base (305667)..(305762): a, c, g or t
  modified_base (305777)..(305778): a, c, g or t
  modified_base (305780)..(305784): a, c, g or t
  modified_base (305786)..(305820): a, c, g or t
  modified_base (305822)..(305823): a, c, g or t
  modified_base (305848)..(305851): a, c, g or t
  modified_base (305853)..(305854): a, c, g or t
  modified_base (305876)..(305876): a, c, g or t
  modified_base (305885)..(305886): a, c, g or t
  modified_base (305897)..(305901): a, c, g or t
  modified_base (305912)..(305915): a, c, g or t
  modified_base (305922)..(305923): a, c, g or t
  modified_base (305948)..(306104): a, c, g or t
  modified_base (306140)..(306141): a, c, g or t
  modified_base (306145)..(306146): a, c, g or t
  modified_base (306149)..(306168): a, c, g or t
  modified_base (306200)..(306201): a, c, g or t
  modified_base (306207)..(306227): a, c, g or t
  modified_base (306230)..(306230): a, c, g or t
  modified_base (306268)..(306271): a, c, g or t
  modified_base (306273)..(306274): a, c, g or t
  modified_base (306280)..(306281): a, c, g or t
  modified_base (306358)..(306367): a, c, g or t
  modified_base (306403)..(306433): a, c, g or t
  modified_base (306443)..(306446): a, c, g or t
  modified_base (306764)..(306766): a, c, g or t
  modified_base (307285)..(307286): a, c, g or t
  modified_base (307320)..(307327): a, c, g or t
  modified_base (307386)..(307387): a, c, g or t
  modified_base (307389)..(307391): a, c, g or t
  modified_base (307527)..(307537): a, c, g or t
  modified_base (307564)..(307568): a, c, g or t
  modified_base (307595)..(307634): a, c, g or t
  modified_base (307665)..(307666): a, c, g or t
  modified_base (307672)..(307683): a, c, g or t
  modified_base (307707)..(307761): a, c, g or t
  modified_base (307772)..(307775): a, c, g or t
  modified_base (307778)..(307779): a, c, g or t
  modified_base (307783)..(307861): a, c, g or t
  modified_base (307866)..(307868): a, c, g or t
  modified_base (307884)..(307885): a, c, g or t
  modified_base (307887)..(307887): a, c, g or t
  modified_base (307891)..(307891): a, c, g or t
  modified_base (307894)..(307895): a, c, g or t
  modified_base (307906)..(307933): a, c, g or t
  modified_base (307966)..(307985): a, c, g or t
  modified_base (307999)..(308000): a, c, g or t
  modified_base (308002)..(308003): a, c, g or t
  modified_base (308009)..(309178): a, c, g or t
  modified_base (309184)..(309184): a, c, g or t
  modified_base (309239)..(309278): a, c, g or t
  modified_base (309329)..(309402): a, c, g or t
  modified_base (309435)..(309435): a, c, g or t
  modified_base (309438)..(309477): a, c, g or t
  modified_base (309518)..(309936): a, c, g or t
  modified_base (310016)..(310017): a, c, g or t
  modified_base (310024)..(310033): a, c, g or t
  modified_base (310913)..(310919): a, c, g or t
  modified_base (310922)..(310924): a, c, g or t
  modified_base (311531)..(311534): a, c, g or t
  modified_base (311566)..(311569): a, c, g or t
  modified_base (311573)..(311574): a, c, g or t
  modified_base (311807)..(311808): a, c, g or t
  modified_base (311810)..(311813): a, c, g or t
  modified_base (312447)..(312457): a, c, g or t
  modified_base (313403)..(313416): a, c, g or t
  modified_base (313418)..(313419): a, c, g or t
  modified_base (313884)..(313894): a, c, g or t
  modified_base (314606)..(314609): a, c, g or t
  modified_base (314674)..(314674): a, c, g or t
  modified_base (314676)..(314680): a, c, g or t
  modified_base (316676)..(316692): a, c, g or t
  modified_base (316698)..(316699): a, c, g or t
  modified_base (317909)..(317909): a, c, g or t
  modified_base (324770)..(324773): a, c, g or t
  modified_base (326578)..(326581): a, c, g or t
  modified_base (330166)..(330167): a, c, g or t
  modified_base (330171)..(330171): a, c, g or t
  modified_base (330291)..(330291): a, c, g or t
  modified_base (330295)..(330298): a, c, g or t
  modified_base (331037)..(331037): a, c, g or t
  modified_base (331725)..(331725): a, c, g or t
  modified_base (332259)..(332259): a, c, g or t
  modified_base (332452)..(332452): a, c, g or t
  modified_base (334197)..(334200): a, c, g or t
  modified_base (342348)..(342348): a, c, g or t
  modified_base (343288)..(343288): a, c, g or t
  modified_base (344101)..(344104): a, c, g or t
  modified_base (344218)..(344218): a, c, g or t
  modified_base (344906)..(344921): a, c, g or t
  modified_base (346625)..(346629): a, c, g or t
  modified_base (346740)..(346741): a, c, g or t
  modified_base (346744)..(346757): a, c, g or t
  modified_base (350138)..(350138): a, c, g or t
  modified_base (350515)..(350518): a, c, g or t
  modified_base (360799)..(360805): a, c, g or t
  modified_base (360840)..(360840): a, c, g or t
  modified_base (360843)..(360849): a, c, g or t
  modified_base (360924)..(360937): a, c, g or t
  modified_base (361000)..(361001): a, c, g or t
  modified_base (361007)..(361009): a, c, g or t
  modified_base (361024)..(361037): a, c, g or t
  modified_base (361084)..(361085): a, c, g or t
  modified_base (361111)..(361112): a, c, g or t
  modified_base (361148)..(361216): a, c, g or t
  modified_base (361218)..(361221): a, c, g or t
  modified_base (361249)..(361264): a, c, g or t
  modified_base (361267)..(361267): a, c, g or t
  modified_base (361272)..(361273): a, c, g or t
  modified_base (361324)..(361339): a, c, g or t
  modified_base (361372)..(361373): a, c, g or t
  modified_base (361386)..(361407): a, c, g or t
  modified_base (361444)..(361472): a, c, g or t
  modified_base (361501)..(361502): a, c, g or t
  modified_base (361508)..(361508): a, c, g or t
  modified_base (366317)..(366317): a, c, g or t
  modified_base (368420)..(368420): a, c, g or t
  modified_base (368664)..(368667): a, c, g or t
  modified_base (368683)..(368686): a, c, g or t
  modified_base (370850)..(370851): a, c, g or t
  modified_base (370853)..(370854): a, c, g or t
  modified_base (370951)..(370951): a, c, g or t
  modified_base (371696)..(371696): a, c, g or t
  modified_base (373758)..(373758): a, c, g or t
  modified_base (373761)..(373761): a, c, g or t
  modified_base (373764)..(373767): a, c, g or t
  modified_base (374657)..(374657): a, c, g or t
  modified_base (377547)..(377547): a, c, g or t
  modified_base (377828)..(377828): a, c, g or t
  modified_base (378755)..(378755): a, c, g or t
  modified_base (382559)..(382560): a, c, g or t
  modified_base (386132)..(386132): a, c, g or t
  modified_base (389637)..(389637): a, c, g or t
  modified_base (389641)..(389642): a, c, g or t
  modified_base (389646)..(389647): a, c, g or t
  modified_base (389735)..(389735): a, c, g or t
  modified_base (389776)..(389785): a, c, g or t
  modified_base (389830)..(389831): a, c, g or t
  modified_base (389834)..(389877): a, c, g or t
  modified_base (389955)..(389960): a, c, g or t
  modified_base (389962)..(389962): a, c, g or t
  modified_base (390778)..(390778): a, c, g or t
  modified_base (391623)..(391625): a, c, g or t
  modified_base (391627)..(391628): a, c, g or t
  modified_base (393297)..(393303): a, c, g or t
  modified_base (393330)..(393330): a, c, g or t
  modified_base (394648)..(394648): a, c, g or t
  modified_base (398494)..(398494): a, c, g or t
  modified_base (405814)..(405814): a, c, g or t
  modified_base (406131)..(406134): a, c, g or t
  modified_base (409507)..(409538): a, c, g or t
  modified_base (409540)..(409541): a, c, g or t
  modified_base (409545)..(409546): a, c, g or t
  modified_base (409585)..(409594): a, c, g or t
  modified_base (409597)..(409598): a, c, g or t
  modified_base (409600)..(409601): a, c, g or t
  modified_base (409699)..(409720): a, c, g or t
  modified_base (409804)..(409805): a, c, g or t
  modified_base (409807)..(409808): a, c, g or t
  modified_base (409817)..(409817): a, c, g or t
  modified_base (409994)..(409994): a, c, g or t
  modified_base (410767)..(410767): a, c, g or t
  modified_base (412002)..(412002): a, c, g or t
  modified_base (414113)..(414115): a, c, g or t
  modified_base (420680)..(420680): a, c, g or t
  modified_base (422928)..(422928): a, c, g or t
  modified_base (424581)..(424587): a, c, g or t
  modified_base (425009)..(425009): a, c, g or t
  modified_base (430568)..(430568): a, c, g or t
  modified_base (431238)..(431238): a, c, g or t
  modified_base (431673)..(431674): a, c, g or t
  modified_base (431712)..(431712): a, c, g or t
  modified_base (431714)..(431715): a, c, g or t
  modified_base (431718)..(431718): a, c, g or t
  modified_base (431721)..(431722): a, c, g or t
  modified_base (431724)..(431733): a, c, g or t
  modified_base (431801)..(431812): a, c, g or t
  modified_base (431870)..(431871): a, c, g or t
  modified_base (431880)..(431881): a, c, g or t
  modified_base (433497)..(433500): a, c, g or t
  modified_base (435245)..(435273): a, c, g or t
  modified_base (436838)..(436839): a, c, g or t
  modified_base (437180)..(437188): a, c, g or t
  modified_base (437246)..(437246): a, c, g or t
  modified_base (437254)..(437254): a, c, g or t
  modified_base (444573)..(444574): a, c, g or t
  modified_base (445269)..(445272): a, c, g or t
  modified_base (446567)..(446567): a, c, g or t
  modified_base (446570)..(446570): a, c, g or t
  modified_base (448260)..(448260): a, c, g or t
  modified_base (452260)..(452260): a, c, g or t
  modified_base (453631)..(453633): a, c, g or t
  modified_base (455001)..(455002): a, c, g or t
  modified_base (456601)..(456602): a, c, g or t
  modified_base (456706)..(456709): a, c, g or t
  modified_base (457324)..(457325): a, c, g or t
  modified_base (459190)..(459192): a, c, g or t
  modified_base (459509)..(459510): a, c, g or t
  modified_base (459932)..(459933): a, c, g or t
  modified_base (459935)..(459935): a, c, g or t
  modified_base (460101)..(460101): a, c, g or t
  modified_base (460302)..(460302): a, c, g or t
  modified_base (461957)..(461958): a, c, g or t
  modified_base (463755)..(463755): a, c, g or t
  modified_base (464450)..(464450): a, c, g or t
  modified_base (469521)..(469528): a, c, g or t
  modified_base (469534)..(469534): a, c, g or t
  modified_base (470340)..(470343): a, c, g or t
  modified_base (473677)..(473677): a, c, g or t
  modified_base (475254)..(475256): a, c, g or t
  modified_base (480476)..(480476): a, c, g or t
  modified_base (482682)..(482682): a, c, g or t
  modified_base (483928)..(483928): a, c, g or t
  modified_base (483936)..(483936): a, c, g or t
  modified_base (484962)..(484962): a, c, g or t
  modified_base (485004)..(485004): a, c, g or t
  modified_base (486932)..(486938): a, c, g or t
  modified_base (486940)..(486940): a, c, g or t
  modified_base (486943)..(486944): a, c, g or t
  modified_base (486946)..(486946): a, c, g or t
  modified_base (487275)..(487284): a, c, g or t
  modified_base (488394)..(488394): a, c, g or t
  modified_base (489172)..(489178): a, c, g or t
  modified_base (489695)..(489698): a, c, g or t
  modified_base (494041)..(494041): a, c, g or t
  modified_base (495979)..(495986): a, c, g or t
  modified_base (497052)..(497052): a, c, g or t
  modified_base (498411)..(498411): a, c, g or t
  modified_base (502101)..(502101): a, c, g or t
  modified_base (504009)..(504020): a, c, g or t
  modified_base (504027)..(504027): a, c, g or t
  modified_base (504412)..(504412): a, c, g or t
  modified_base (506096)..(506096): a, c, g or t
  modified_base (507368)..(507373): a, c, g or t
  modified_base (514651)..(514651): a, c, g or t
  modified_base (515641)..(515641): a, c, g or t
  modified_base (517751)..(517751): a, c, g or t
  modified_base (521970)..(521970): a, c, g or t
  modified_base (523669)..(523672): a, c, g or t
  modified_base (524444)..(524444): a, c, g or t
  modified_base (528416)..(528418): a, c, g or t
  modified_base (528721)..(528724): a, c, g or t
  modified_base (530494)..(530494): a, c, g or t
  modified_base (540682)..(540685): a, c, g or t
  modified_base (543863)..(543864): a, c, g or t
  modified_base (555114)..(555114): a, c, g or t
  modified_base (557029)..(557029): a, c, g or t
  modified_base (559224)..(559224): a, c, g or t
  modified_base (560219)..(560223): a, c, g or t
  modified_base (565972)..(565972): a, c, g or t
  modified_base (567531)..(567531): a, c, g or t
  modified_base (568889)..(568889): a, c, g or t
  modified_base (571294)..(571294): a, c, g or t
  modified_base (573022)..(573028): a, c, g or t
  modified_base (574806)..(574806): a, c, g or t
  modified_base (578383)..(578383): a, c, g or t
  modified_base (581603)..(581603): a, c, g or t
  modified_base (581855)..(581868): a, c, g or t
  modified_base (585499)..(585503): a, c, g or t
  modified_base (585878)..(585887): a, c, g or t
  modified_base (586167)..(586167): a, c, g or t
  modified_base (586486)..(586489): a, c, g or t
  modified_base (589939)..(589939): a, c, g or t
  modified_base (591009)..(591009): a, c, g or t
  modified_base (591729)..(591729): a, c, g or t
  modified_base (591731)..(591743): a, c, g or t
  modified_base (591789)..(591792): a, c, g or t
  modified_base (592670)..(592670): a, c, g or t
  modified_base (592987)..(592987): a, c, g or t
  modified_base (594140)..(594140): a, c, g or t
  modified_base (594144)..(594148): a, c, g or t
  modified_base (594151)..(594152): a, c, g or t
  modified_base (594774)..(594774): a, c, g or t
  modified_base (595054)..(595054): a, c, g or t
  modified_base (595166)..(595166): a, c, g or t
  modified_base (595218)..(595218): a, c, g or t
  modified_base (595254)..(595254): a, c, g or t
  modified_base (595324)..(595324): a, c, g or t
  modified_base (595334)..(595334): a, c, g or t
  modified_base (595975)..(595978): a, c, g or t
  modified_base (598140)..(598141): a, c, g or t
  modified_base (598145)..(598153): a, c, g or t
  modified_base (602334)..(602334): a, c, g or t
  modified_base (604066)..(604067): a, c, g or t
  modified_base (606087)..(606088): a, c, g or t
  modified_base (606220)..(606225): a, c, g or t
  modified_base (607128)..(607128): a, c, g or t
  modified_base (609359)..(609359): a, c, g or t
  modified_base (611867)..(611867): a, c, g or t
  modified_base (615627)..(615642): a, c, g or t
  modified_base (615896)..(615897): a, c, g or t
  modified_base (616312)..(616312): a, c, g or t
  modified_base (618194)..(618194): a, c, g or t
  modified_base (618197)..(618198): a, c, g or t
  modified_base (618852)..(618855): a, c, g or t
  modified_base (619407)..(619407): a, c, g or t
  modified_base (620050)..(620050): a, c, g or t
  modified_base (620802)..(620803): a, c, g or t
  modified_base (622970)..(622974): a, c, g or t
  modified_base (624391)..(624391): a, c, g or t
  modified_base (625206)..(625209): a, c, g or t
  modified_base (625243)..(625246): a, c, g or t
  modified_base (625624)..(625627): a, c, g or t
  modified_base (627569)..(627569): a, c, g or t
  modified_base (628728)..(628728): a, c, g or t
  modified_base (628893)..(628893): a, c, g or t
  modified_base (628904)..(628904): a, c, g or t
  modified_base (630430)..(630433): a, c, g or t
  modified_base (630641)..(630641): a, c, g or t
  modified_base (632319)..(632319): a, c, g or t
  modified_base (632635)..(632635): a, c, g or t
  modified_base (634307)..(634307): a, c, g or t
  modified_base (634905)..(634905): a, c, g or t
  modified_base (634993)..(634993): a, c, g or t
  modified_base (636256)..(636259): a, c, g or t
  modified_base (636263)..(636264): a, c, g or t
  modified_base (636570)..(636580): a, c, g or t
  modified_base (637768)..(637768): a, c, g or t
  modified_base (637770)..(637777): a, c, g or t
  modified_base (638422)..(638425): a, c, g or t
  modified_base (639556)..(639569): a, c, g or t
  modified_base (641807)..(641807): a, c, g or t
  modified_base (641810)..(641811): a, c, g or t
  modified_base (644698)..(644698): a, c, g or t
  modified_base (648241)..(648241): a, c, g or t
  modified_base (648323)..(648323): a, c, g or t
  modified_base (648358)..(648358): a, c, g or t
  modified_base (649192)..(649192): a, c, g or t
  modified_base (649276)..(649276): a, c, g or t
  modified_base (650148)..(650151): a, c, g or t
  modified_base (650810)..(650813): a, c, g or t
  modified_base (650815)..(650816): a, c, g or t
  modified_base (651982)..(651995): a, c, g or t
  modified_base (652939)..(652939): a, c, g or t
  modified_base (653523)..(653538): a, c, g or t
  modified_base (654889)..(654889): a, c, g or t
  modified_base (654895)..(654898): a, c, g or t
  modified_base (655053)..(655054): a, c, g or t
  modified_base (655058)..(655066): a, c, g or t
  modified_base (655293)..(655297): a, c, g or t
  modified_base (655963)..(655963): a, c, g or t
  modified_base (656001)..(656012): a, c, g or t
  modified_base (656274)..(656277): a, c, g or t
  modified_base (657455)..(657458): a, c, g or t
  modified_base (657644)..(657646): a, c, g or t
  modified_base (657672)..(657673): a, c, g or t
  modified_base (658009)..(658009): a, c, g or t
  modified_base (658954)..(658955): a, c, g or t
  modified_base (661722)..(661722): a, c, g or t
  modified_base (662186)..(662188): a, c, g or t
  modified_base (662382)..(662382): a, c, g or t
  modified_base (664782)..(664782): a, c, g or t
  modified_base (664787)..(664798): a, c, g or t
  modified_base (665007)..(665007): a, c, g or t
  modified_base (665605)..(665605): a, c, g or t
  modified_base (665609)..(665610): a, c, g or t
  modified_base (665613)..(665618): a, c, g or t
  modified_base (666834)..(666835): a, c, g or t
  modified_base (667553)..(667554): a, c, g or t
  modified_base (668391)..(668394): a, c, g or t
  modified_base (669377)..(669378): a, c, g or t
  modified_base (669393)..(669394): a, c, g or t
  modified_base (669397)..(669397): a, c, g or t
  modified_base (669406)..(669406): a, c, g or t
  modified_base (669408)..(669446): a, c, g or t
  modified_base (670969)..(670969): a, c, g or t
  modified_base (671334)..(671338): a, c, g or t
  modified_base (672185)..(672185): a, c, g or t
  modified_base (673146)..(673150): a, c, g or t
  modified_base (676592)..(676592): a, c, g or t
  modified_base (678104)..(678104): a, c, g or t
  modified_base (685061)..(685061): a, c, g or t
  modified_base (687870)..(687870): a, c, g or t
  modified_base (688026)..(688026): a, c, g or t
  modified_base (688992)..(688992): a, c, g or t
  modified_base (689540)..(689541): a, c, g or t
  modified_base (692530)..(692530): a, c, g or t
  modified_base (692916)..(692916): a, c, g or t
  modified_base (693132)..(693132): a, c, g or t
  modified_base (695933)..(695933): a, c, g or t
  modified_base (696026)..(696031): a, c, g or t
  modified_base (696868)..(696870): a, c, g or t
  modified_base (698237)..(698237): a, c, g or t
  modified_base (698861)..(698862): a, c, g or t
  modified_base (698865)..(698865): a, c, g or t
  modified_base (698868)..(698869): a, c, g or t
  modified_base (703581)..(703581): a, c, g or t
  modified_base (703633)..(703633): a, c, g or t
  modified_base (703641)..(703641): a, c, g or t
  modified_base (704656)..(704656): a, c, g or t
  modified_base (704988)..(704988): a, c, g or t
  modified_base (706436)..(706436): a, c, g or t
  modified_base (706919)..(706919): a, c, g or t
  modified_base (707074)..(707074): a, c, g or t
  modified_base (707216)..(707216): a, c, g or t
  modified_base (707664)..(707664): a, c, g or t
  modified_base (712776)..(712776): a, c, g or t
  modified_base (714460)..(714464): a, c, g or t
  modified_base (714466)..(714469): a, c, g or t
  modified_base (716160)..(716160): a, c, g or t
  modified_base (716331)..(716331): a, c, g or t
  modified_base (717687)..(717687): a, c, g or t
  modified_base (720996)..(720996): a, c, g or t
  modified_base (721561)..(721565): a, c, g or t
  modified_base (724948)..(724948): a, c, g or t
  modified_base (725529)..(725529): a, c, g or t
  modified_base (727886)..(727886): a, c, g or t
  modified_base (729811)..(729811): a, c, g or t
  modified_base (729953)..(729953): a, c, g or t
  modified_base (732245)..(732248): a, c, g or t
  modified_base (733889)..(733889): a, c, g or t
  modified_base (734891)..(734891): a, c, g or t
  modified_base (734893)..(734897): a, c, g or t
  modified_base (736497)..(736500): a, c, g or t
  modified_base (737741)..(737741): a, c, g or t
  modified_base (738483)..(738483): a, c, g or t
  modified_base (738493)..(738493): a, c, g or t
  modified_base (738645)..(738645): a, c, g or t
  modified_base (738649)..(738649): a, c, g or t
  modified_base (739403)..(739403): a, c, g or t
  modified_base (739679)..(739679): a, c, g or t
  modified_base (739781)..(739781): a, c, g or t
  modified_base (741596)..(741613): a, c, g or t
  modified_base (744800)..(744800): a, c, g or t
  modified_base (747734)..(747734): a, c, g or t
  modified_base (748099)..(748099): a, c, g or t
  modified_base (748556)..(748556): a, c, g or t
  modified_base (748786)..(748790): a, c, g or t
  modified_base (749604)..(749604): a, c, g or t
  modified_base (750083)..(750083): a, c, g or t
  modified_base (753691)..(753691): a, c, g or t
  modified_base (754752)..(754753): a, c, g or t
  modified_base (756485)..(756485): a, c, g or t
  modified_base (756509)..(756509): a, c, g or t
  modified_base (758574)..(758574): a, c, g or t
  modified_base (759574)..(759574): a, c, g or t
  modified_base (759635)..(759635): a, c, g or t
  modified_base (759745)..(759745): a, c, g or t
  modified_base (762972)..(762972): a, c, g or t
  modified_base (765086)..(765086): a, c, g or t
  modified_base (765946)..(765946): a, c, g or t
  modified_base (766395)..(766395): a, c, g or t
  modified_base (766496)..(766496): a, c, g or t
  modified_base (768974)..(768977): a, c, g or t
  modified_base (772823)..(772823): a, c, g or t
  modified_base (774934)..(774934): a, c, g or t
  modified_base (775088)..(775088): a, c, g or t
  modified_base (775370)..(775370): a, c, g or t
  modified_base (775413)..(775417): a, c, g or t
  modified_base (775421)..(775421): a, c, g or t
  modified_base (775450)..(775456): a, c, g or t
  modified_base (775565)..(775566): a, c, g or t
  modified_base (776410)..(776410): a, c, g or t
  modified_base (778006)..(778006): a, c, g or t
  modified_base (778357)..(778360): a, c, g or t
  modified_base (781879)..(781879): a, c, g or t
  modified_base (782104)..(782104): a, c, g or t
  modified_base (782655)..(782655): a, c, g or t
  modified_base (783775)..(783775): a, c, g or t
  modified_base (783964)..(783964): a, c, g or t
  modified_base (784224)..(784224): a, c, g or t
  modified_base (786859)..(786867): a, c, g or t
  modified_base (789515)..(789518): a, c, g or t
  modified_base (789986)..(789989): a, c, g or t
  modified_base (792286)..(792291): a, c, g or t
  modified_base (793619)..(793619): a, c, g or t
  modified_base (796438)..(796438): a, c, g or t
  modified_base (796795)..(796795): a, c, g or t
  modified_base (797231)..(797234): a, c, g or t
  modified_base (798647)..(798650): a, c, g or t
  modified_base (798933)..(798933): a, c, g or t
  modified_base (800264)..(800264): a, c, g or t
  modified_base (803326)..(803329): a, c, g or t
  modified_base (805000)..(805000): a, c, g or t
  modified_base (805165)..(805165): a, c, g or t
  modified_base (806646)..(806647): a, c, g or t
  modified_base (806925)..(806926): a, c, g or t
  modified_base (807398)..(807398): a, c, g or t
  modified_base (808012)..(808012): a, c, g or t
  modified_base (808457)..(808457): a, c, g or t
  modified_base (808743)..(808743): a, c, g or t
  modified_base (809143)..(809143): a, c, g or t
  modified_base (809317)..(809318): a, c, g or t
  modified_base (809324)..(809325): a, c, g or t
  modified_base (810065)..(810066): a, c, g or t
  modified_base (810263)..(810269): a, c, g or t
  modified_base (812205)..(812205): a, c, g or t
  modified_base (812207)..(812211): a, c, g or t
  modified_base (812626)..(812626): a, c, g or t
  modified_base (815916)..(815916): a, c, g or t
  modified_base (816475)..(816485): a, c, g or t
  modified_base (816783)..(816783): a, c, g or t
  modified_base (816905)..(816905): a, c, g or t
  modified_base (817309)..(817309): a, c, g or t
  modified_base (818866)..(818866): a, c, g or t
  modified_base (819806)..(819806): a, c, g or t
  modified_base (821727)..(821727): a, c, g or t
  modified_base (824406)..(824412): a, c, g or t
  modified_base (825699)..(825699): a, c, g or t
  modified_base (828358)..(828358): a, c, g or t
  modified_base (828360)..(828363): a, c, g or t
  modified_base (828589)..(828589): a, c, g or t
  modified_base (828620)..(828624): a, c, g or t
  modified_base (829872)..(829872): a, c, g or t
  modified_base (832150)..(832155): a, c, g or t
  modified_base (834164)..(834164): a, c, g or t
  modified_base (834471)..(834471): a, c, g or t
  modified_base (834488)..(834488): a, c, g or t
  modified_base (834768)..(834769): a, c, g or t
  modified_base (835920)..(835930): a, c, g or t
  modified_base (836912)..(836912): a, c, g or t
  modified_base (837829)..(837830): a, c, g or t
  modified_base (837832)..(837834): a, c, g or t
  modified_base (841466)..(841468): a, c, g or t
  modified_base (841471)..(841472): a, c, g or t
  modified_base (842227)..(842227): a, c, g or t
  modified_base (842483)..(842483): a, c, g or t
  modified_base (843022)..(843023): a, c, g or t
  modified_base (843025)..(843040): a, c, g or t
  modified_base (843501)..(843501): a, c, g or t
  modified_base (843650)..(843653): a, c, g or t
  modified_base (843657)..(843657): a, c, g or t
  modified_base (846672)..(846675): a, c, g or t
  modified_base (850455)..(850458): a, c, g or t
  modified_base (850856)..(850856): a, c, g or t
  modified_base (851412)..(851421): a, c, g or t
  modified_base (852163)..(852166): a, c, g or t
  modified_base (853229)..(853232): a, c, g or t
  modified_base (861080)..(861080): a, c, g or t
  modified_base (863145)..(863145): a, c, g or t
  modified_base (863808)..(863811): a, c, g or t
  modified_base (863975)..(863976): a, c, g or t
  modified_base (863979)..(864005): a, c, g or t
  modified_base (864110)..(864121): a, c, g or t
  modified_base (864124)..(864124): a, c, g or t
  modified_base (864190)..(864212): a, c, g or t
  modified_base (868882)..(868882): a, c, g or t
  modified_base (868885)..(868885): a, c, g or t
  modified_base (869349)..(869349): a, c, g or t
  modified_base (871041)..(871041): a, c, g or t
  modified_base (872598)..(872598): a, c, g or t
  modified_base (872619)..(872619): a, c, g or t
  modified_base (872849)..(872849): a, c, g or t
  modified_base (873366)..(873368): a, c, g or t
  modified_base (873567)..(873568): a, c, g or t
  modified_base (873571)..(873574): a, c, g or t
  modified_base (873753)..(873753): a, c, g or t
  modified_base (874317)..(874323): a, c, g or t
  modified_base (874327)..(874327): a, c, g or t
  modified_base (874334)..(874335): a, c, g or t
  modified_base (874893)..(874893): a, c, g or t
  modified_base (877050)..(877050): a, c, g or t
  modified_base (881463)..(881463): a, c, g or t
  modified_base (884510)..(884515): a, c, g or t
  modified_base (885137)..(885137): a, c, g or t
  modified_base (886228)..(886231): a, c, g or t
  modified_base (886444)..(886451): a, c, g or t
  modified_base (888634)..(888634): a, c, g or t
  modified_base (889772)..(889772): a, c, g or t
  modified_base (890749)..(890752): a, c, g or t
  modified_base (890981)..(890981): a, c, g or t
  modified_base (891705)..(891706): a, c, g or t
  modified_base (891734)..(891740): a, c, g or t
  modified_base (891742)..(891743): a, c, g or t
  modified_base (891797)..(891797): a, c, g or t
  modified_base (892712)..(892712): a, c, g or t
  modified_base (894384)..(894384): a, c, g or t
  modified_base (894386)..(894397): a, c, g or t
  modified_base (894604)..(894604): a, c, g or t
  modified_base (894700)..(894701): a, c, g or t
  modified_base (894798)..(894799): a, c, g or t
  modified_base (894802)..(894807): a, c, g or t
  modified_base (895829)..(895830): a, c, g or t
  modified_base (895851)..(895854): a, c, g or t
  modified_base (895924)..(895927): a, c, g or t
  modified_base (895946)..(895950): a, c, g or t
  modified_base (896038)..(896038): a, c, g or t
  modified_base (896655)..(896659): a, c, g or t
  modified_base (896683)..(896689): a, c, g or t
  modified_base (896692)..(896692): a, c, g or t
  modified_base (897752)..(897755): a, c, g or t
  modified_base (897826)..(897837): a, c, g or t
  modified_base (897897)..(897897): a, c, g or t
  modified_base (898829)..(898832): a, c, g or t
  modified_base (900978)..(900978): a, c, g or t
  modified_base (901496)..(901496): a, c, g or t
  modified_base (901769)..(901769): a, c, g or t
  modified_base (902140)..(902140): a, c, g or t
  modified_base (902233)..(902233): a, c, g or t
  modified_base (907744)..(907744): a, c, g or t
  modified_base (907780)..(907780): a, c, g or t
  modified_base (909640)..(909640): a, c, g or t
  modified_base (915001)..(915001): a, c, g or t
  modified_base (915169)..(915169): a, c, g or t
  modified_base (915482)..(915482): a, c, g or t
  modified_base (915516)..(915516): a, c, g or t
  modified_base (915534)..(915534): a, c, g or t
  modified_base (915549)..(915549): a, c, g or t
  modified_base (915551)..(915551): a, c, g or t
  modified_base (915582)..(915582): a, c, g or t
  modified_base (915595)..(915595): a, c, g or t
  modified_base (915710)..(915710): a, c, g or t
  modified_base (915867)..(915867): a, c, g or t
  modified_base (915873)..(915873): a, c, g or t
  modified_base (915900)..(915900): a, c, g or t
  modified_base (915933)..(915933): a, c, g or t
  modified_base (915972)..(915972): a, c, g or t
  modified_base (915999)..(915999): a, c, g or t
  modified_base (916139)..(916139): a, c, g or t
  modified_base (916146)..(916146): a, c, g or t
  modified_base (916178)..(916178): a, c, g or t
  modified_base (916273)..(916273): a, c, g or t
  modified_base (916310)..(916314): a, c, g or t
  modified_base (916442)..(916442): a, c, g or t
  modified_base (916559)..(916559): a, c, g or t
  modified_base (916718)..(916718): a, c, g or t
  modified_base (917004)..(917008): a, c, g or t
  modified_base (917270)..(917270): a, c, g or t
  modified_base (917328)..(917328): a, c, g or t
  modified_base (917364)..(917364): a, c, g or t
  modified_base (917433)..(917433): a, c, g or t
  modified_base (917477)..(917477): a, c, g or t
  modified_base (917881)..(917881): a, c, g or t
  modified_base (918103)..(918116): a, c, g or t
  modified_base (918131)..(918131): a, c, g or t
  modified_base (918325)..(918325): a, c, g or t
  modified_base (918370)..(918370): a, c, g or t
  modified_base (918468)..(918468): a, c, g or t
  modified_base (918639)..(918639): a, c, g or t
  modified_base (918714)..(918714): a, c, g or t
  modified_base (918894)..(918894): a, c, g or t
  modified_base (919608)..(919608): a, c, g or t
  modified_base (919686)..(919686): a, c, g or t
  modified_base (919842)..(919842): a, c, g or t
  modified_base (919893)..(919893): a, c, g or t
  modified_base (919926)..(919926): a, c, g or t
  modified_base (919935)..(919935): a, c, g or t
  modified_base (919954)..(919954): a, c, g or t
  modified_base (919968)..(919968): a, c, g or t
  modified_base (920001)..(920001): a, c, g or t
  modified_base (920157)..(920157): a, c, g or t
  modified_base (920256)..(920256): a, c, g or t
  modified_base (920418)..(920418): a, c, g or t
  modified_base (920466)..(920466): a, c, g or t
  modified_base (920508)..(920508): a, c, g or t
  modified_base (920544)..(920544): a, c, g or t
  modified_base (920639)..(920639): a, c, g or t
  modified_base (920676)..(920676): a, c, g or t
  modified_base (920691)..(920691): a, c, g or t
  modified_base (920757)..(920757): a, c, g or t
  modified_base (920883)..(920883): a, c, g or t
  modified_base (920901)..(920901): a, c, g or t
  modified_base (920938)..(920957): a, c, g or t
  modified_base (920968)..(920968): a, c, g or t
  modified_base (920998)..(920998): a, c, g or t
  modified_base (921025)..(921025): a, c, g or t
  modified_base (921036)..(921036): a, c, g or t
  modified_base (921055)..(921055): a, c, g or t
  modified_base (921076)..(921076): a, c, g or t
  modified_base (921079)..(921079): a, c, g or t
  modified_base (921231)..(921231): a, c, g or t
  modified_base (921244)..(921244): a, c, g or t
  modified_base (921249)..(921249): a, c, g or t
  modified_base (921280)..(921280): a, c, g or t
  modified_base (921295)..(921295): a, c, g or t
  modified_base (921313)..(921313): a, c, g or t
  modified_base (921332)..(921332): a, c, g or t
  modified_base (921358)..(921358): a, c, g or t
  modified_base (921370)..(921374): a, c, g or t
  modified_base (921409)..(921409): a, c, g or t
  modified_base (921460)..(921460): a, c, g or t
  modified_base (921515)..(921515): a, c, g or t
  modified_base (921529)..(921529): a, c, g or t
  modified_base (921569)..(921572): a, c, g or t
  modified_base (921574)..(921574): a, c, g or t
  modified_base (921590)..(921590): a, c, g or t
  modified_base (921630)..(921630): a, c, g or t
  modified_base (921734)..(921734): a, c, g or t
  modified_base (921759)..(921759): a, c, g or t
  modified_base (921777)..(921777): a, c, g or t
  modified_base (921798)..(921798): a, c, g or t
  modified_base (921804)..(921804): a, c, g or t
  modified_base (921846)..(921846): a, c, g or t
  modified_base (921865)..(921865): a, c, g or t
  modified_base (921888)..(921888): a, c, g or t
  modified_base (921945)..(921945): a, c, g or t
  modified_base (921951)..(921951): a, c, g or t
  modified_base (922020)..(922020): a, c, g or t
  modified_base (922029)..(922029): a, c, g or t
  modified_base (922074)..(922074): a, c, g or t
  modified_base (922101)..(922101): a, c, g or t
  modified_base (922143)..(922143): a, c, g or t
  modified_base (922150)..(922150): a, c, g or t
  modified_base (922161)..(922161): a, c, g or t
  modified_base (922211)..(922211): a, c, g or t
  modified_base (922478)..(922482): a, c, g or t
  modified_base (922855)..(922855): a, c, g or t
  modified_base (922878)..(922878): a, c, g or t
  modified_base (922893)..(922893): a, c, g or t
  modified_base (922911)..(922911): a, c, g or t
  modified_base (922944)..(922944): a, c, g or t
  modified_base (923053)..(923053): a, c, g or t
  modified_base (923065)..(923065): a, c, g or t
  modified_base (923086)..(923086): a, c, g or t
  modified_base (923103)..(923103): a, c, g or t
  modified_base (923116)..(923116): a, c, g or t
  modified_base (923399)..(923399): a, c, g or t
  modified_base (923865)..(923865): a, c, g or t
  modified_base (923959)..(923959): a, c, g or t
  modified_base (924475)..(924478): a, c, g or t
  modified_base (925758)..(925758): a, c, g or t
  modified_base (925813)..(925822): a, c, g or t
  modified_base (925883)..(925884): a, c, g or t
  modified_base (927996)..(927996): a, c, g or t
  modified_base (928525)..(928525): a, c, g or t
  modified_base (929150)..(929152): a, c, g or t
  modified_base (929259)..(929259): a, c, g or t
  modified_base (929381)..(929381): a, c, g or t
  modified_base (930866)..(930866): a, c, g or t
  modified_base (932591)..(932591): a, c, g or t
  modified_base (933298)..(933298): a, c, g or t
  modified_base (933398)..(933398): a, c, g or t
  modified_base (934127)..(934131): a, c, g or t
  modified_base (934882)..(934882): a, c, g or t
  modified_base (935711)..(935711): a, c, g or t
  modified_base (936816)..(936816): a, c, g or t
  modified_base (937188)..(937188): a, c, g or t
  modified_base (937828)..(937828): a, c, g or t
  modified_base (937831)..(937837): a, c, g or t
  modified_base (938075)..(938075): a, c, g or t
  modified_base (939309)..(939309): a, c, g or t
  modified_base (939576)..(939576): a, c, g or t
  modified_base (939789)..(939790): a, c, g or t
  modified_base (941899)..(941915): a, c, g or t
  modified_base (942548)..(942548): a, c, g or t
  modified_base (942867)..(942867): a, c, g or t
  modified_base (945049)..(945049): a, c, g or t
  modified_base (946500)..(946500): a, c, g or t
  modified_base (947875)..(947875): a, c, g or t
  modified_base (949557)..(949557): a, c, g or t
  modified_base (950797)..(950797): a, c, g or t
  modified_base (951058)..(951058): a, c, g or t
  modified_base (954776)..(954776): a, c, g or t
  modified_base (955727)..(955727): a, c, g or t
  modified_base (956314)..(956314): a, c, g or t
  modified_base (956697)..(956700): a, c, g or t
  modified_base (957261)..(957261): a, c, g or t
  modified_base (958518)..(958522): a, c, g or t
  modified_base (959483)..(959486): a, c, g or t
  modified_base (960426)..(960431): a, c, g or t
  modified_base (960450)..(960450): a, c, g or t
  modified_base (960728)..(960731): a, c, g or t
  modified_base (960975)..(960978): a, c, g or t
  modified_base (961938)..(961938): a, c, g or t
  modified_base (962224)..(962227): a, c, g or t
  modified_base (963321)..(963321): a, c, g or t
  modified_base (965180)..(965181): a, c, g or t
  modified_base (965403)..(965403): a, c, g or t
  modified_base (966555)..(966555): a, c, g or t
  modified_base (969219)..(969219): a, c, g or t
  modified_base (969470)..(969470): a, c, g or t
  modified_base (970344)..(970349): a, c, g or t
  modified_base (973378)..(973378): a, c, g or t
  modified_base (974137)..(974137): a, c, g or t
  modified_base (975586)..(975586): a, c, g or t
  modified_base (976157)..(976157): a, c, g or t
  modified_base (977112)..(977112): a, c, g or t
  modified_base (978930)..(978930): a, c, g or t
  modified_base (978939)..(978939): a, c, g or t
  modified_base (979913)..(979914): a, c, g or t
  modified_base (982178)..(982181): a, c, g or t
  modified_base (983609)..(983612): a, c, g or t
  modified_base (986099)..(986099): a, c, g or t
  modified_base (986904)..(986904): a, c, g or t
  modified_base (987285)..(987285): a, c, g or t
  modified_base (988488)..(988489): a, c, g or t
  modified_base (988491)..(988499): a, c, g or t
  modified_base (988503)..(988503): a, c, g or t
  modified_base (989005)..(989005): a, c, g or t
  modified_base (991164)..(991164): a, c, g or t
  modified_base (995958)..(995958): a, c, g or t
  modified_base (996009)..(996009): a, c, g or t
  modified_base (996437)..(996440): a, c, g or t
  modified_base (999302)..(999302): a, c, g or t
  modified_base (1003420)..(1003429): a, c, g or t
  modified_base (1003739)..(1003739): a, c, g or t
  modified_base (1006777)..(1006777): a, c, g or t
  modified_base (1009336)..(1009342): a, c, g or t
  modified_base (1010551)..(1010556): a, c, g or t
  modified_base (1010823)..(1010823): a, c, g or t
  modified_base (1012017)..(1012017): a, c, g or t
  modified_base (1016473)..(1016473): a, c, g or t
  modified_base (1016539)..(1016539): a, c, g or t
  modified_base (1016737)..(1016737): a, c, g or t
  modified_base (1016968)..(1016968): a, c, g or t
  modified_base (1017076)..(1017076): a, c, g or t
  modified_base (1017122)..(1017122): a, c, g or t
  modified_base (1017124)..(1017124): a, c, g or t
  modified_base (1017130)..(1017130): a, c, g or t
  modified_base (1022144)..(1022147): a, c, g or t
  modified_base (1025444)..(1025444): a, c, g or t
  modified_base (1026003)..(1026008): a, c, g or t
  modified_base (1031209)..(1031209): a, c, g or t
  modified_base (1031345)..(1031345): a, c, g or t
  modified_base (1031446)..(1031446): a, c, g or t
  modified_base (1032177)..(1032178): a, c, g or t
  modified_base (1032451)..(1032459): a, c, g or t
  modified_base (1033020)..(1033021): a, c, g or t
  modified_base (1033070)..(1033074): a, c, g or t
  modified_base (1033581)..(1033586): a, c, g or t
  modified_base (1034691)..(1034691): a, c, g or t
  modified_base (1035565)..(1035565): a, c, g or t
  modified_base (1036266)..(1036266): a, c, g or t
  modified_base (1036577)..(1036577): a, c, g or t
  modified_base (1037803)..(1037806): a, c, g or t
  modified_base (1038992)..(1038992): a, c, g or t
  modified_base (1040300)..(1040300): a, c, g or t
  modified_base (1040814)..(1040814): a, c, g or t
  modified_base (1044952)..(1044953): a, c, g or t
  modified_base (1044960)..(1044961): a, c, g or t
  modified_base (1047829)..(1047829): a, c, g or t
  modified_base (1050452)..(1050455): a, c, g or t
  modified_base (1053904)..(1053909): a, c, g or t
  modified_base (1053911)..(1053911): a, c, g or t
  modified_base (1055611)..(1055611): a, c, g or t
  modified_base (1056878)..(1056878): a, c, g or t
  modified_base (1060098)..(1060103): a, c, g or t
  modified_base (1060445)..(1060445): a, c, g or t
  modified_base (1062288)..(1062288): a, c, g or t
  modified_base (1063809)..(1063809): a, c, g or t
  modified_base (1064535)..(1064535): a, c, g or t
  modified_base (1066852)..(1066852): a, c, g or t
  modified_base (1067949)..(1067949): a, c, g or t
  modified_base (1068510)..(1068510): a, c, g or t
  modified_base (1068584)..(1068584): a, c, g or t
  modified_base (1068939)..(1068939): a, c, g or t
  modified_base (1069378)..(1069378): a, c, g or t
  modified_base (1071920)..(1071920): a, c, g or t
  modified_base (1075063)..(1075063): a, c, g or t
  modified_base (1080091)..(1080091): a, c, g or t
  modified_base (1080093)..(1080096): a, c, g or t
  modified_base (1083035)..(1083084): a, c, g or t
  modified_base (1084929)..(1084929): a, c, g or t
  modified_base (1085653)..(1085653): a, c, g or t
  modified_base (1086353)..(1086357): a, c, g or t
  modified_base (1089525)..(1089525): a, c, g or t
  modified_base (1090976)..(1090976): a, c, g or t
  modified_base (1093558)..(1093558): a, c, g or t
  modified_base (1097544)..(1097547): a, c, g or t
  modified_base (1102472)..(1102472): a, c, g or t
  modified_base (1103016)..(1103016): a, c, g or t
  modified_base (1103200)..(1103200): a, c, g or t
  modified_base (1103543)..(1103543): a, c, g or t
  modified_base (1105460)..(1105460): a, c, g or t
  modified_base (1105999)..(1106000): a, c, g or t
  modified_base (1106004)..(1106004): a, c, g or t
  modified_base (1107794)..(1107794): a, c, g or t
  modified_base (1110654)..(1110654): a, c, g or t
  modified_base (1111576)..(1111576): a, c, g or t
  modified_base (1114665)..(1114665): a, c, g or t
  modified_base (1117446)..(1117446): a, c, g or t
  modified_base (1120075)..(1120075): a, c, g or t
  modified_base (1121170)..(1121170): a, c, g or t
  modified_base (1122383)..(1122383): a, c, g or t
  modified_base (1123377)..(1123377): a, c, g or t
  modified_base (1123396)..(1123396): a, c, g or t
  modified_base (1124474)..(1124474): a, c, g or t
  modified_base (1124561)..(1124561): a, c, g or t
  modified_base (1124714)..(1124714): a, c, g or t
  modified_base (1125765)..(1125765): a, c, g or t
  modified_base (1125940)..(1125941): a, c, g or t
  modified_base (1126001)..(1126013): a, c, g or t
  modified_base (1126016)..(1126016): a, c, g or t
  modified_base (1127069)..(1127069): a, c, g or t
  modified_base (1127072)..(1127072): a, c, g or t
  modified_base (1131327)..(1131327): a, c, g or t
  modified_base (1132190)..(1132190): a, c, g or t
  modified_base (1133092)..(1133092): a, c, g or t
  modified_base (1134903)..(1134906): a, c, g or t
  modified_base (1137457)..(1137457): a, c, g or t
  modified_base (1138730)..(1138730): a, c, g or t
  modified_base (1139343)..(1139343): a, c, g or t
  modified_base (1139406)..(1139406): a, c, g or t
  modified_base (1144183)..(1144187): a, c, g or t
  modified_base (1144189)..(1144189): a, c, g or t
  modified_base (1148610)..(1148610): a, c, g or t
  modified_base (1148732)..(1148732): a, c, g or t
  modified_base (1150787)..(1150787): a, c, g or t
  modified_base (1151076)..(1151076): a, c, g or t
  modified_base (1155711)..(1155711): a, c, g or t
  modified_base (1156372)..(1156380): a, c, g or t
  modified_base (1156383)..(1156386): a, c, g or t
  modified_base (1156633)..(1156633): a, c, g or t
  modified_base (1159489)..(1159489): a, c, g or t
  modified_base (1163078)..(1163078): a, c, g or t
  modified_base (1165021)..(1165021): a, c, g or t
  modified_base (1173496)..(1173496): a, c, g or t
  modified_base (1174240)..(1174240): a, c, g or t
  modified_base (1175553)..(1175553): a, c, g or t
  modified_base (1178760)..(1178761): a, c, g or t
  modified_base (1178763)..(1178774): a, c, g or t
  modified_base (1179177)..(1179177): a, c, g or t
  modified_base (1179189)..(1179189): a, c, g or t
  modified_base (1179246)..(1179246): a, c, g or t
  modified_base (1180763)..(1180763): a, c, g or t
  modified_base (1182048)..(1182051): a, c, g or t
  modified_base (1186774)..(1186774): a, c, g or t
  modified_base (1186912)..(1186912): a, c, g or t
  modified_base (1187369)..(1187369): a, c, g or t
  modified_base (1187450)..(1187450): a, c, g or t
  modified_base (1189068)..(1189068): a, c, g or t
  modified_base (1189081)..(1189081): a, c, g or t
  modified_base (1190239)..(1190239): a, c, g or t
  modified_base (1190253)..(1190253): a, c, g or t
  modified_base (1191509)..(1191509): a, c, g or t
  modified_base (1191578)..(1191580): a, c, g or t
  modified_base (1191649)..(1191649): a, c, g or t
  modified_base (1191869)..(1191869): a, c, g or t
  modified_base (1192426)..(1192427): a, c, g or t
  modified_base (1192777)..(1192777): a, c, g or t
  modified_base (1193249)..(1193249): a, c, g or t
  modified_base (1194491)..(1194491): a, c, g or t
  modified_base (1194740)..(1194744): a, c, g or t
  modified_base (1194919)..(1194919): a, c, g or t
  modified_base (1195015)..(1195015): a, c, g or t
  modified_base (1195355)..(1195364): a, c, g or t
  modified_base (1195822)..(1195823): a, c, g or t
  modified_base (1196885)..(1196885): a, c, g or t
  modified_base (1197187)..(1197187): a, c, g or t
  modified_base (1197593)..(1197599): a, c, g or t
  modified_base (1198717)..(1198720): a, c, g or t
  modified_base (1198722)..(1198725): a, c, g or t
  modified_base (1200623)..(1200624): a, c, g or t
  modified_base (1201300)..(1201300): a, c, g or t
  modified_base (1201514)..(1201514): a, c, g or t
  modified_base (1201943)..(1201943): a, c, g or t
  modified_base (1204880)..(1204883): a, c, g or t
  modified_base (1205697)..(1205697): a, c, g or t
  modified_base (1209601)..(1209603): a, c, g or t
  modified_base (1212677)..(1212688): a, c, g or t
  modified_base (1214777)..(1214777): a, c, g or t
  modified_base (1217715)..(1217715): a, c, g or t
  modified_base (1217717)..(1217718): a, c, g or t
  modified_base (1220813)..(1220813): a, c, g or t
  modified_base (1221486)..(1221486): a, c, g or t
  modified_base (1221498)..(1221498): a, c, g or t
  modified_base (1222736)..(1222736): a, c, g or t
  modified_base (1223145)..(1223153): a, c, g or t
  modified_base (1223332)..(1223333): a, c, g or t
  modified_base (1225505)..(1225508): a, c, g or t
  modified_base (1225751)..(1225758): a, c, g or t
  modified_base (1225994)..(1225994): a, c, g or t
  modified_base (1226822)..(1226822): a, c, g or t
  modified_base (1227354)..(1227354): a, c, g or t
  modified_base (1230479)..(1230479): a, c, g or t
  modified_base (1232941)..(1232941): a, c, g or t
  modified_base (1234685)..(1234685): a, c, g or t
  modified_base (1235401)..(1235401): a, c, g or t
  modified_base (1235544)..(1235544): a, c, g or t
  modified_base (1235725)..(1235725): a, c, g or t
  modified_base (1235956)..(1235956): a, c, g or t
  modified_base (1239293)..(1239293): a, c, g or t
  modified_base (1240389)..(1240392): a, c, g or t
  modified_base (1241637)..(1241641): a, c, g or t
  modified_base (1244943)..(1244943): a, c, g or t
  modified_base (1244946)..(1244946): a, c, g or t
  modified_base (1245437)..(1245440): a, c, g or t
  modified_base (1248174)..(1248174): a, c, g or t
  modified_base (1248927)..(1248933): a, c, g or t
  modified_base (1249024)..(1249024): a, c, g or t
  modified_base (1251434)..(1251440): a, c, g or t
  modified_base (1252691)..(1252700): a, c, g or t
  modified_base (1252710)..(1252710): a, c, g or t
  modified_base (1253386)..(1253386): a, c, g or t
  modified_base (1253699)..(1253706): a, c, g or t
  modified_base (1253766)..(1253767): a, c, g or t
  modified_base (1254559)..(1254559): a, c, g or t
  modified_base (1256167)..(1256170): a, c, g or t
  modified_base (1257047)..(1257086): a, c, g or t
  modified_base (1259262)..(1259262): a, c, g or t
  modified_base (1259568)..(1259568): a, c, g or t
  modified_base (1260189)..(1260189): a, c, g or t
  modified_base (1261350)..(1261368): a, c, g or t
  modified_base (1262871)..(1262877): a, c, g or t
  modified_base (1262880)..(1262881): a, c, g or t
  modified_base (1263806)..(1263809): a, c, g or t
  modified_base (1266620)..(1266620): a, c, g or t
  modified_base (1267311)..(1267311): a, c, g or t
  modified_base (1268258)..(1268258): a, c, g or t
  modified_base (1268464)..(1268464): a, c, g or t
  modified_base (1271576)..(1271576): a, c, g or t
  modified_base (1272316)..(1272316): a, c, g or t
  modified_base (1276048)..(1276048): a, c, g or t
  modified_base (1278490)..(1278491): a, c, g or t
  modified_base (1278494)..(1278498): a, c, g or t
  modified_base (1280404)..(1280404): a, c, g or t
  modified_base (1281488)..(1281488): a, c, g or t
  modified_base (1281490)..(1281493): a, c, g or t
  modified_base (1282046)..(1282046): a, c, g or t
  modified_base (1282058)..(1282058): a, c, g or t
  modified_base (1283691)..(1283691): a, c, g or t
  modified_base (1284212)..(1284212): a, c, g or t
  modified_base (1284767)..(1284770): a, c, g or t
  modified_base (1286487)..(1286487): a, c, g or t
  modified_base (1287096)..(1287102): a, c, g or t
  modified_base (1287635)..(1287635): a, c, g or t
  modified_base (1291436)..(1291436): a, c, g or t
  modified_base (1291839)..(1291839): a, c, g or t
  modified_base (1294397)..(1294397): a, c, g or t
  modified_base (1298599)..(1298599): a, c, g or t
  modified_base (1298754)..(1298754): a, c, g or t
  modified_base (1303271)..(1303271): a, c, g or t
  modified_base (1303275)..(1303277): a, c, g or t
  modified_base (1307233)..(1307233): a, c, g or t
  modified_base (1307741)..(1307741): a, c, g or t
  modified_base (1310577)..(1310577): a, c, g or t
  modified_base (1312263)..(1312263): a, c, g or t
  modified_base (1313349)..(1313349): a, c, g or t
  modified_base (1314821)..(1314821): a, c, g or t
  modified_base (1314872)..(1314882): a, c, g or t
  modified_base (1315434)..(1315438): a, c, g or t
  modified_base (1315645)..(1315645): a, c, g or t
  modified_base (1316814)..(1316814): a, c, g or t
  modified_base (1318118)..(1318118): a, c, g or t
  modified_base (1320185)..(1320187): a, c, g or t
  modified_base (1320189)..(1320194): a, c, g or t
  modified_base (1323825)..(1323825): a, c, g or t
  modified_base (1324648)..(1324648): a, c, g or t
  modified_base (1325200)..(1325203): a, c, g or t
  modified_base (1325371)..(1325371): a, c, g or t
  modified_base (1326909)..(1326909): a, c, g or t
  modified_base (1328263)..(1328270): a, c, g or t
  modified_base (1328277)..(1328278): a, c, g or t
  modified_base (1329817)..(1329817): a, c, g or t
  modified_base (1331232)..(1331232): a, c, g or t
  modified_base (1331439)..(1331439): a, c, g or t
  modified_base (1331620)..(1331621): a, c, g or t
  modified_base (1331624)..(1331628): a, c, g or t
  modified_base (1332791)..(1332795): a, c, g or t
  modified_base (1333054)..(1333054): a, c, g or t
  modified_base (1333299)..(1333299): a, c, g or t
  modified_base (1333418)..(1333418): a, c, g or t
  modified_base (1333919)..(1333919): a, c, g or t
  modified_base (1333973)..(1333973): a, c, g or t
  modified_base (1333999)..(1333999): a, c, g or t
  modified_base (1334011)..(1334012): a, c, g or t
  modified_base (1335064)..(1335065): a, c, g or t
  modified_base (1335582)..(1335582): a, c, g or t
  modified_base (1337840)..(1337840): a, c, g or t
  modified_base (1337846)..(1337847): a, c, g or t
  modified_base (1340412)..(1340412): a, c, g or t
  modified_base (1341097)..(1341097): a, c, g or t
  modified_base (1341563)..(1341569): a, c, g or t
  modified_base (1342551)..(1342558): a, c, g or t
  modified_base (1348479)..(1348479): a, c, g or t
  modified_base (1350257)..(1350258): a, c, g or t
  modified_base (1352169)..(1352170): a, c, g or t
  modified_base (1352259)..(1352262): a, c, g or t
  modified_base (1352267)..(1352271): a, c, g or t
  modified_base (1352317)..(1352320): a, c, g or t
  modified_base (1352324)..(1352387): a, c, g or t
  modified_base (1352423)..(1352465): a, c, g or t
  modified_base (1352656)..(1352656): a, c, g or t
  modified_base (1353430)..(1353433): a, c, g or t
  modified_base (1353435)..(1353435): a, c, g or t
  modified_base (1354508)..(1354509): a, c, g or t
  modified_base (1355307)..(1355307): a, c, g or t
  modified_base (1355697)..(1355699): a, c, g or t
  modified_base (1356949)..(1356951): a, c, g or t
  modified_base (1357170)..(1357181): a, c, g or t
  modified_base (1357350)..(1358587): a, c, g or t
  modified_base (1366839)..(1366839): a, c, g or t
  modified_base (1366888)..(1366954): a, c, g or t
  modified_base (1367332)..(1367333): a, c, g or t
  modified_base (1367339)..(1367340): a, c, g or t
  modified_base (1368232)..(1368232): a, c, g or t
  modified_base (1369858)..(1369858): a, c, g or t
  modified_base (1369867)..(1369872): a, c, g or t
  modified_base (1370929)..(1370929): a, c, g or t
  modified_base (1371105)..(1371105): a, c, g or t
  modified_base (1371108)..(1371115): a, c, g or t
  modified_base (1373576)..(1373576): a, c, g or t
  modified_base (1375527)..(1375530): a, c, g or t
  modified_base (1375582)..(1375582): a, c, g or t
  modified_base (1375587)..(1375596): a, c, g or t
  modified_base (1375601)..(1375601): a, c, g or t
  modified_base (1375717)..(1375720): a, c, g or t
  modified_base (1377373)..(1377373): a, c, g or t
  modified_base (1377385)..(1377385): a, c, g or t
  modified_base (1377427)..(1377427): a, c, g or t
  modified_base (1377484)..(1377484): a, c, g or t
  modified_base (1377628)..(1377628): a, c, g or t
  modified_base (1377652)..(1377652): a, c, g or t
  modified_base (1378226)..(1378229): a, c, g or t
  modified_base (1378272)..(1378272): a, c, g or t
  modified_base (1379300)..(1379303): a, c, g or t
  modified_base (1380794)..(1380794): a, c, g or t
  modified_base (1381050)..(1381050): a, c, g or t
  modified_base (1381132)..(1381132): a, c, g or t
  modified_base (1381170)..(1381170): a, c, g or t
  modified_base (1381532)..(1381536): a, c, g or t
  modified_base (1381584)..(1381584): a, c, g or t
  modified_base (1381586)..(1381586): a, c, g or t
  modified_base (1382512)..(1382554): a, c, g or t
  modified_base (1382657)..(1382696): a, c, g or t
  modified_base (1382843)..(1382898): a, c, g or t
  modified_base (1382932)..(1382971): a, c, g or t
  modified_base (1383336)..(1383336): a, c, g or t
  modified_base (1383462)..(1383462): a, c, g or t
  modified_base (1383464)..(1383465): a, c, g or t
  modified_base (1383470)..(1383470): a, c, g or t
  modified_base (1383549)..(1383559): a, c, g or t
  modified_base (1383623)..(1383628): a, c, g or t
  modified_base (1383659)..(1383659): a, c, g or t
  modified_base (1383667)..(1383681): a, c, g or t
  modified_base (1383758)..(1383766): a, c, g or t
  modified_base (1383971)..(1383971): a, c, g or t
  modified_base (1384102)..(1384102): a, c, g or t
  modified_base (1384312)..(1384312): a, c, g or t
  modified_base (1384456)..(1384456): a, c, g or t
  modified_base (1384462)..(1384466): a, c, g or t
  modified_base (1384475)..(1384478): a, c, g or t
  modified_base (1384525)..(1384525): a, c, g or t
  modified_base (1384529)..(1384529): a, c, g or t
  modified_base (1384533)..(1384547): a, c, g or t
  modified_base (1384556)..(1384557): a, c, g or t
  modified_base (1384670)..(1384670): a, c, g or t
  modified_base (1385004)..(1385007): a, c, g or t
  modified_base (1385009)..(1385011): a, c, g or t
  modified_base (1385026)..(1385026): a, c, g or t
  modified_base (1385107)..(1385109): a, c, g or t
  modified_base (1385288)..(1385288): a, c, g or t
  modified_base (1385378)..(1385416): a, c, g or t
  modified_base (1385532)..(1385532): a, c, g or t
  modified_base (1385598)..(1385598): a, c, g or t
  modified_base (1385607)..(1385648): a, c, g or t
  modified_base (1385779)..(1385784): a, c, g or t
  modified_base (1385874)..(1385874): a, c, g or t
  modified_base (1385995)..(1385997): a, c, g or t
  modified_base (1386004)..(1386005): a, c, g or t
  modified_base (1386011)..(1386011): a, c, g or t
  modified_base (1386237)..(1386237): a, c, g or t
  modified_base (1386292)..(1386292): a, c, g or t
  modified_base (1386321)..(1386323): a, c, g or t
  modified_base (1386325)..(1386326): a, c, g or t
  modified_base (1386385)..(1386385): a, c, g or t
  modified_base (1386460)..(1386463): a, c, g or t
  modified_base (1386563)..(1386567): a, c, g or t
  modified_base (1386571)..(1386571): a, c, g or t
  modified_base (1386574)..(1386574): a, c, g or t
  modified_base (1386838)..(1386838): a, c, g or t
  modified_base (1386873)..(1386873): a, c, g or t
  modified_base (1386883)..(1386883): a, c, g or t
  modified_base (1386904)..(1386904): a, c, g or t
  modified_base (1386919)..(1386919): a, c, g or t
  modified_base (1386958)..(1386958): a, c, g or t
  modified_base (1386990)..(1386990): a, c, g or t
  modified_base (1386997)..(1386997): a, c, g or t
  modified_base (1387190)..(1387204): a, c, g or t
  modified_base (1387249)..(1387249): a, c, g or t
  modified_base (1387300)..(1387300): a, c, g or t
  modified_base (1387321)..(1387321): a, c, g or t
  modified_base (1387372)..(1387372): a, c, g or t
  modified_base (1387384)..(1387384): a, c, g or t
  modified_base (1387429)..(1387607): a, c, g or t
  modified_base (1387647)..(1387715): a, c, g or t
  modified_base (1387718)..(1387721): a, c, g or t
  modified_base (1387730)..(1387731): a, c, g or t
  modified_base (1387792)..(1387854): a, c, g or t
  modified_base (1387889)..(1387935): a, c, g or t
  modified_base (1387938)..(1387940): a, c, g or t
  modified_base (1387946)..(1387947): a, c, g or t
  modified_base (1387977)..(1387978): a, c, g or t
  modified_base (1387980)..(1388001): a, c, g or t
  modified_base (1388011)..(1388012): a, c, g or t
  modified_base (1388016)..(1388019): a, c, g or t
  modified_base (1388115)..(1388119): a, c, g or t
  modified_base (1388122)..(1388122): a, c, g or t
  modified_base (1388137)..(1388142): a, c, g or t
  modified_base (1388173)..(1388186): a, c, g or t
  modified_base (1388210)..(1388219): a, c, g or t
  modified_base (1388224)..(1388224): a, c, g or t
  modified_base (1388271)..(1388355): a, c, g or t
  modified_base (1388357)..(1388358): a, c, g or t
  modified_base (1388406)..(1388495): a, c, g or t
  modified_base (1388522)..(1388522): a, c, g or t
  modified_base (1388593)..(1388630): a, c, g or t
  modified_base (1388633)..(1388633): a, c, g or t
  modified_base (1388669)..(1388738): a, c, g or t
  modified_base (1388775)..(1388844): a, c, g or t
  modified_base (1388871)..(1388937): a, c, g or t
  modified_base (1388961)..(1389295): a, c, g or t
  modified_base (1389305)..(1389308): a, c, g or t
  modified_base (1389331)..(1389406): a, c, g or t
  modified_base (1389430)..(1389543): a, c, g or t
  modified_base (1389569)..(1389569): a, c, g or t
  modified_base (1389571)..(1389572): a, c, g or t
  modified_base (1389574)..(1389575): a, c, g or t
  modified_base (1389577)..(1389618): a, c, g or t
  modified_base (1389700)..(1389704): a, c, g or t
  modified_base (1389718)..(1389719): a, c, g or t
  modified_base (1389764)..(1389803): a, c, g or t
  modified_base (1389805)..(1389806): a, c, g or t
  modified_base (1389865)..(1389866): a, c, g or t
  modified_base (1389889)..(1389890): a, c, g or t
  modified_base (1389919)..(1390076): a, c, g or t
  modified_base (1390078)..(1390082): a, c, g or t
  modified_base (1390124)..(1390145): a, c, g or t
  modified_base (1390159)..(1390159): a, c, g or t
  modified_base (1390172)..(1390173): a, c, g or t
  modified_base (1390175)..(1390182): a, c, g or t
  modified_base (1390208)..(1390208): a, c, g or t
  modified_base (1390224)..(1390253): a, c, g or t
  modified_base (1390386)..(1390427): a, c, g or t
  modified_base (1390459)..(1390466): a, c, g or t
  modified_base (1390518)..(1390522): a, c, g or t
  modified_base (1390551)..(1390554): a, c, g or t
  modified_base (1390556)..(1390612): a, c, g or t
  modified_base (1390642)..(1390682): a, c, g or t
  modified_base (1390718)..(1390719): a, c, g or t
  modified_base (1390752)..(1390765): a, c, g or t
  modified_base (1390789)..(1390841): a, c, g or t
  modified_base (1390853)..(1390854): a, c, g or t
  modified_base (1390865)..(1390954): a, c, g or t
  modified_base (1390994)..(1391033): a, c, g or t
  modified_base (1391058)..(1391174): a, c, g or t
  modified_base (1391206)..(1391240): a, c, g or t
  modified_base (1391263)..(1391305): a, c, g or t
  modified_base (1391334)..(1391384): a, c, g or t
  modified_base (1391604)..(1391655): a, c, g or t
  modified_base (1391681)..(1391693): a, c, g or t
  modified_base (1391724)..(1391724): a, c, g or t
  modified_base (1391729)..(1391729): a, c, g or t
  modified_base (1391807)..(1391810): a, c, g or t
  modified_base (1391855)..(1391862): a, c, g or t
  modified_base (1391923)..(1391925): a, c, g or t
  modified_base (1391968)..(1391969): a, c, g or t
  modified_base (1392020)..(1392071): a, c, g or t
  modified_base (1392074)..(1392074): a, c, g or t
  modified_base (1392324)..(1392332): a, c, g or t
  modified_base (1392335)..(1392338): a, c, g or t
  modified_base (1392360)..(1392360): a, c, g or t
  modified_base (1392399)..(1392399): a, c, g or t
  modified_base (1392404)..(1392410): a, c, g or t
  modified_base (1392420)..(1392421): a, c, g or t
  modified_base (1392434)..(1392440): a, c, g or t
  modified_base (1392487)..(1392490): a, c, g or t
  modified_base (1392492)..(1392499): a, c, g or t
  modified_base (1392528)..(1392550): a, c, g or t
  modified_base (1392562)..(1392563): a, c, g or t
  modified_base (1392579)..(1392580): a, c, g or t
  modified_base (1392583)..(1392585): a, c, g or t
  modified_base (1392587)..(1392588): a, c, g or t
  modified_base (1392630)..(1392641): a, c, g or t
  modified_base (1392691)..(1392703): a, c, g or t
  modified_base (1392756)..(1392803): a, c, g or t
  modified_base (1392853)..(1392856): a, c, g or t
  modified_base (1392858)..(1392977): a, c, g or t
  modified_base (1393015)..(1393015): a, c, g or t
  modified_base (1393038)..(1393079): a, c, g or t
  modified_base (1393107)..(1393153): a, c, g or t
  modified_base (1393155)..(1393155): a, c, g or t
  modified_base (1393221)..(1393222): a, c, g or t
  modified_base (1393233)..(1393234): a, c, g or t
  modified_base (1393236)..(1393237): a, c, g or t
  modified_base (1393470)..(1393470): a, c, g or t
  modified_base (1393576)..(1393577): a, c, g or t
  modified_base (1393598)..(1393599): a, c, g or t
  modified_base (1393872)..(1393872): a, c, g or t
  modified_base (1393897)..(1393897): a, c, g or t
  modified_base (1393959)..(1393960): a, c, g or t
  modified_base (1394228)..(1394228): a, c, g or t
  modified_base (1394231)..(1394232): a, c, g or t
  modified_base (1394252)..(1394252): a, c, g or t
  modified_base (1395101)..(1395101): a, c, g or t
  modified_base (1395200)..(1395201): a, c, g or t
  modified_base (1395353)..(1395353): a, c, g or t
  modified_base (1396060)..(1396060): a, c, g or t
  modified_base (1396339)..(1396339): a, c, g or t
  modified_base (1396403)..(1396403): a, c, g or t
  modified_base (1396406)..(1396410): a, c, g or t
  modified_base (1396769)..(1396783): a, c, g or t
  modified_base (1397426)..(1397426): a, c, g or t
  modified_base (1397848)..(1397848): a, c, g or t
  modified_base (1397855)..(1397855): a, c, g or t
  modified_base (1398406)..(1398407): a, c, g or t
  modified_base (1398534)..(1398548): a, c, g or t
  modified_base (1398602)..(1398603): a, c, g or t
  modified_base (1398617)..(1398618): a, c, g or t
  modified_base (1398620)..(1398622): a, c, g or t
  modified_base (1398627)..(1398634): a, c, g or t
  modified_base (1398638)..(1398638): a, c, g or t
  modified_base (1398641)..(1398642): a, c, g or t
  modified_base (1398705)..(1398705): a, c, g or t
  modified_base (1398792)..(1398792): a, c, g or t
  modified_base (1398816)..(1398816): a, c, g or t
  modified_base (1398849)..(1398859): a, c, g or t
  modified_base (1398861)..(1398862): a, c, g or t
  modified_base (1398883)..(1398907): a, c, g or t
  modified_base (1398909)..(1398910): a, c, g or t
  modified_base (1398942)..(1398942): a, c, g or t
  modified_base (1399172)..(1399172): a, c, g or t
  modified_base (1399260)..(1399260): a, c, g or t
  modified_base (1399310)..(1399310): a, c, g or t
  modified_base (1399315)..(1399315): a, c, g or t
  modified_base (1399426)..(1399426): a, c, g or t
  modified_base (1399450)..(1399450): a, c, g or t
  modified_base (1399577)..(1399577): a, c, g or t
  modified_base (1399778)..(1399781): a, c, g or t
  modified_base (1399787)..(1399823): a, c, g or t
  modified_base (1400090)..(1400090): a, c, g or t
  modified_base (1400105)..(1400109): a, c, g or t
  modified_base (1400124)..(1400163): a, c, g or t
  modified_base (1400207)..(1400247): a, c, g or t
  modified_base (1400552)..(1400553): a, c, g or t
  modified_base (1400979)..(1400983): a, c, g or t
  modified_base (1405255)..(1405260): a, c, g or t
  modified_base (1405494)..(1405505): a, c, g or t
  modified_base (1406417)..(1406417): a, c, g or t
  modified_base (1406764)..(1406764): a, c, g or t
  modified_base (1406792)..(1406793): a, c, g or t
  modified_base (1406797)..(1406805): a, c, g or t
  modified_base (1406830)..(1406831): a, c, g or t
  modified_base (1406883)..(1406884): a, c, g or t
  modified_base (1406886)..(1406889): a, c, g or t
  modified_base (1407458)..(1407504): a, c, g or t
  modified_base (1407507)..(1407508): a, c, g or t
  modified_base (1407891)..(1407891): a, c, g or t
  modified_base (1408275)..(1408280): a, c, g or t
  modified_base (1408933)..(1408934): a, c, g or t
  modified_base (1409218)..(1409219): a, c, g or t
  modified_base (1409708)..(1409708): a, c, g or t
  modified_base (1412823)..(1412826): a, c, g or t
  modified_base (1413103)..(1413104): a, c, g or t
  modified_base (1413106)..(1413107): a, c, g or t
  modified_base (1414767)..(1414767): a, c, g or t
  modified_base (1415091)..(1415091): a, c, g or t
  modified_base (1416038)..(1416044): a, c, g or t
  modified_base (1416903)..(1416903): a, c, g or t
  modified_base (1418014)..(1418014): a, c, g or t
  modified_base (1418338)..(1418338): a, c, g or t
  modified_base (1419031)..(1419040): a, c, g or t
  modified_base (1421619)..(1421619): a, c, g or t
  modified_base (1421628)..(1421629): a, c, g or t
  modified_base (1423341)..(1423341): a, c, g or t
  modified_base (1427439)..(1427439): a, c, g or t
  modified_base (1427546)..(1427551): a, c, g or t
  modified_base (1427913)..(1427913): a, c, g or t
  modified_base (1432186)..(1432189): a, c, g or t
  modified_base (1432998)..(1432998): a, c, g or t
  modified_base (1433516)..(1433523): a, c, g or t
  modified_base (1437134)..(1437137): a, c, g or t
  modified_base (1437426)..(1437426): a, c, g or t
  modified_base (1438534)..(1438534): a, c, g or t
  modified_base (1439640)..(1439640): a, c, g or t
  modified_base (1441530)..(1441530): a, c, g or t
  modified_base (1442941)..(1442965): a, c, g or t
  modified_base (1443380)..(1443381): a, c, g or t
  modified_base (1443541)..(1443544): a, c, g or t
  modified_base (1445050)..(1445050): a, c, g or t
  modified_base (1445178)..(1445178): a, c, g or t
  modified_base (1445340)..(1445344): a, c, g or t
  modified_base (1445752)..(1445752): a, c, g or t
  modified_base (1445757)..(1445757): a, c, g or t
  modified_base (1447007)..(1447007): a, c, g or t
  modified_base (1447062)..(1447062): a, c, g or t
  modified_base (1447088)..(1447088): a, c, g or t
  modified_base (1447499)..(1447499): a, c, g or t
  modified_base (1447684)..(1447684): a, c, g or t
  modified_base (1450086)..(1450091): a, c, g or t
  modified_base (1450413)..(1450413): a, c, g or t
  modified_base (1450416)..(1450416): a, c, g or t
  modified_base (1450987)..(1450987): a, c, g or t
  modified_base (1451157)..(1451157): a, c, g or t
  modified_base (1451872)..(1451872): a, c, g or t
  modified_base (1453118)..(1453118): a, c, g or t
  modified_base (1457272)..(1457272): a, c, g or t
  modified_base (1458070)..(1458070): a, c, g or t
  modified_base (1459429)..(1459430): a, c, g or t
  modified_base (1461997)..(1461998): a, c, g or t
  modified_base (1462539)..(1462539): a, c, g or t
  modified_base (1463127)..(1463130): a, c, g or t
  modified_base (1464818)..(1464818): a, c, g or t
  modified_base (1466171)..(1466171): a, c, g or t
  modified_base (1467834)..(1467834): a, c, g or t
  modified_base (1471769)..(1471769): a, c, g or t
  modified_base (1471797)..(1471797): a, c, g or t
  modified_base (1472999)..(1473000): a, c, g or t
  modified_base (1474026)..(1474026): a, c, g or t
  modified_base (1474427)..(1474427): a, c, g or t
  modified_base (1475844)..(1475851): a, c, g or t
  modified_base (1475865)..(1475866): a, c, g or t
  modified_base (1476712)..(1476712): a, c, g or t
  modified_base (1476923)..(1476923): a, c, g or t
  modified_base (1476940)..(1476940): a, c, g or t
  modified_base (1481318)..(1481322): a, c, g or t
  modified_base (1481908)..(1481908): a, c, g or t
  modified_base (1482389)..(1482389): a, c, g or t
  modified_base (1483287)..(1483287): a, c, g or t
  modified_base (1484902)..(1484902): a, c, g or t
  modified_base (1485652)..(1485652): a, c, g or t
  modified_base (1486788)..(1486788): a, c, g or t
  modified_base (1487836)..(1487836): a, c, g or t
  modified_base (1487857)..(1487857): a, c, g or t
  modified_base (1487972)..(1487972): a, c, g or t
  modified_base (1487975)..(1487975): a, c, g or t
  modified_base (1488366)..(1488366): a, c, g or t
  modified_base (1489246)..(1489246): a, c, g or t
  modified_base (1490015)..(1490019): a, c, g or t
  modified_base (1490196)..(1490196): a, c, g or t
  modified_base (1492278)..(1492278): a, c, g or t
  modified_base (1493706)..(1493706): a, c, g or t
  modified_base (1493929)..(1493930): a, c, g or t
  modified_base (1494624)..(1494624): a, c, g or t
  modified_base (1495870)..(1495880): a, c, g or t
  modified_base (1496006)..(1496012): a, c, g or t
  modified_base (1497023)..(1497023): a, c, g or t
  modified_base (1497069)..(1497073): a, c, g or t
  modified_base (1497757)..(1497757): a, c, g or t
  modified_base (1497759)..(1497759): a, c, g or t
  modified_base (1499384)..(1499384): a, c, g or t
  modified_base (1499708)..(1499708): a, c, g or t
  modified_base (1499938)..(1499953): a, c, g or t
  modified_base (1500773)..(1500791): a, c, g or t
  modified_base (1501228)..(1501228): a, c, g or t
  modified_base (1501911)..(1501916): a, c, g or t
  modified_base (1502298)..(1502298): a, c, g or t
  modified_base (1502389)..(1502389): a, c, g or t
  modified_base (1502394)..(1502394): a, c, g or t
  modified_base (1502573)..(1502575): a, c, g or t
  modified_base (1502577)..(1502577): a, c, g or t
  modified_base (1502603)..(1502607): a, c, g or t
  modified_base (1502610)..(1502610): a, c, g or t
  modified_base (1502622)..(1502622): a, c, g or t
  modified_base (1502652)..(1502652): a, c, g or t
  modified_base (1502694)..(1502700): a, c, g or t
  modified_base (1502705)..(1502706): a, c, g or t
  modified_base (1502762)..(1502768): a, c, g or t
  modified_base (1502772)..(1502773): a, c, g or t
  modified_base (1502789)..(1502816): a, c, g or t
  modified_base (1502848)..(1502854): a, c, g or t
  modified_base (1502933)..(1502950): a, c, g or t
  modified_base (1502956)..(1502956): a, c, g or t
  modified_base (1503060)..(1503060): a, c, g or t
  modified_base (1503096)..(1503099): a, c, g or t
  modified_base (1503183)..(1503183): a, c, g or t
  modified_base (1504519)..(1504519): a, c, g or t
  modified_base (1505266)..(1505269): a, c, g or t
  modified_base (1505400)..(1505400): a, c, g or t
  modified_base (1506851)..(1506851): a, c, g or t
  modified_base (1506853)..(1506854): a, c, g or t
  modified_base (1506856)..(1506857): a, c, g or t
  modified_base (1507910)..(1507910): a, c, g or t
  modified_base (1508335)..(1508339): a, c, g or t
  modified_base (1509137)..(1509137): a, c, g or t
  modified_base (1509752)..(1509752): a, c, g or t
  modified_base (1510869)..(1510869): a, c, g or t
  modified_base (1510915)..(1510915): a, c, g or t
  modified_base (1511381)..(1511381): a, c, g or t
  modified_base (1511406)..(1511406): a, c, g or t
  modified_base (1512185)..(1512186): a, c, g or t
  modified_base (1512190)..(1512191): a, c, g or t
  modified_base (1512837)..(1512837): a, c, g or t
  modified_base (1513073)..(1513073): a, c, g or t
  modified_base (1513612)..(1513616): a, c, g or t
  modified_base (1513714)..(1513714): a, c, g or t
  modified_base (1514240)..(1514240): a, c, g or t
  modified_base (1514277)..(1514513): a, c, g or t
  modified_base (1514528)..(1514532): a, c, g or t
  modified_base (1514564)..(1514564): a, c, g or t
  modified_base (1514616)..(1514859): a, c, g or t
  modified_base (1514889)..(1514937): a, c, g or t
  modified_base (1514950)..(1514950): a, c, g or t
  modified_base (1514972)..(1514972): a, c, g or t
  modified_base (1514977)..(1515019): a, c, g or t
  modified_base (1515030)..(1515031): a, c, g or t
  modified_base (1515055)..(1515098): a, c, g or t
  modified_base (1515119)..(1515120): a, c, g or t
  modified_base (1515132)..(1515179): a, c, g or t
  modified_base (1515182)..(1515183): a, c, g or t
  modified_base (1515213)..(1515263): a, c, g or t
  modified_base (1515290)..(1515444): a, c, g or t
  modified_base (1515451)..(1515452): a, c, g or t
  modified_base (1515456)..(1515457): a, c, g or t
  modified_base (1515461)..(1515462): a, c, g or t
  modified_base (1515483)..(1515483): a, c, g or t
  modified_base (1515490)..(1515564): a, c, g or t
  modified_base (1515595)..(1515707): a, c, g or t
  modified_base (1515718)..(1515719): a, c, g or t
  modified_base (1515724)..(1515727): a, c, g or t
  modified_base (1515731)..(1515736): a, c, g or t
  modified_base (1515738)..(1515738): a, c, g or t
  modified_base (1515747)..(1515748): a, c, g or t
  modified_base (1515758)..(1515801): a, c, g or t
  modified_base (1515928)..(1515928): a, c, g or t
  modified_base (1515937)..(1515937): a, c, g or t
  modified_base (1515940)..(1515940): a, c, g or t
  modified_base (1515943)..(1515943): a, c, g or t
  modified_base (1515967)..(1516010): a, c, g or t
  modified_base (1516074)..(1516138): a, c, g or t
  modified_base (1516149)..(1516149): a, c, g or t
  modified_base (1516154)..(1516154): a, c, g or t
  modified_base (1516221)..(1516225): a, c, g or t
  modified_base (1516376)..(1516396): a, c, g or t
  modified_base (1516402)..(1516402): a, c, g or t
  modified_base (1516486)..(1516493): a, c, g or t
  modified_base (1516537)..(1516590): a, c, g or t
  modified_base (1516592)..(1516593): a, c, g or t
  modified_base (1516632)..(1516633): a, c, g or t
  modified_base (1516635)..(1516640): a, c, g or t
  modified_base (1516654)..(1516654): a, c, g or t
  modified_base (1516664)..(1516665): a, c, g or t
  modified_base (1516671)..(1516923): a, c, g or t
  modified_base (1516929)..(1516931): a, c, g or t
  modified_base (1516946)..(1516946): a, c, g or t
  modified_base (1516977)..(1517031): a, c, g or t
  modified_base (1517090)..(1517207): a, c, g or t
  modified_base (1517216)..(1517217): a, c, g or t
  modified_base (1517229)..(1517352): a, c, g or t
  modified_base (1517381)..(1517392): a, c, g or t
  modified_base (1517406)..(1517406): a, c, g or t
  modified_base (1517439)..(1517498): a, c, g or t
  modified_base (1517501)..(1517502): a, c, g or t
  modified_base (1517536)..(1517579): a, c, g or t
  modified_base (1517607)..(1517650): a, c, g or t
  modified_base (1517667)..(1517668): a, c, g or t
  modified_base (1517716)..(1517719): a, c, g or t
  modified_base (1517755)..(1517799): a, c, g or t
  modified_base (1517862)..(1517899): a, c, g or t
  modified_base (1517932)..(1517932): a, c, g or t
  modified_base (1517935)..(1518237): a, c, g or t
  modified_base (1518270)..(1518273): a, c, g or t
  modified_base (1518275)..(1518334): a, c, g or t
  modified_base (1518378)..(1518392): a, c, g or t
  modified_base (1518408)..(1518408): a, c, g or t
  modified_base (1518416)..(1518425): a, c, g or t
  modified_base (1518444)..(1518445): a, c, g or t
  modified_base (1518449)..(1518450): a, c, g or t
  modified_base (1518454)..(1518454): a, c, g or t
  modified_base (1518474)..(1518479): a, c, g or t
  modified_base (1518503)..(1518531): a, c, g or t
  modified_base (1518540)..(1518540): a, c, g or t
  modified_base (1518552)..(1518552): a, c, g or t
  modified_base (1518555)..(1518576): a, c, g or t
  modified_base (1518600)..(1518607): a, c, g or t
  modified_base (1518634)..(1518644): a, c, g or t
  modified_base (1518668)..(1518718): a, c, g or t
  modified_base (1518743)..(1518743): a, c, g or t
  modified_base (1518763)..(1518930): a, c, g or t
  modified_base (1518954)..(1519119): a, c, g or t
  modified_base (1519207)..(1519254): a, c, g or t
  modified_base (1519258)..(1519259): a, c, g or t
  modified_base (1519333)..(1519339): a, c, g or t
  modified_base (1520026)..(1520026): a, c, g or t
  modified_base (1520112)..(1520112): a, c, g or t
  modified_base (1520177)..(1520177): a, c, g or t
  modified_base (1520230)..(1520234): a, c, g or t
  modified_base (1520273)..(1520273): a, c, g or t
  modified_base (1520309)..(1520309): a, c, g or t
  modified_base (1520596)..(1520598): a, c, g or t
  modified_base (1520654)..(1520668): a, c, g or t
  modified_base (1520693)..(1520737): a, c, g or t
  modified_base (1520809)..(1520824): a, c, g or t
  modified_base (1520894)..(1521090): a, c, g or t
  modified_base (1521094)..(1521095): a, c, g or t
  modified_base (1521113)..(1521115): a, c, g or t
  modified_base (1521149)..(1521150): a, c, g or t
  modified_base (1521189)..(1521200): a, c, g or t
  modified_base (1521209)..(1521210): a, c, g or t
  modified_base (1521212)..(1521215): a, c, g or t
  modified_base (1521218)..(1521219): a, c, g or t
  modified_base (1521221)..(1521222): a, c, g or t
  modified_base (1521224)..(1521254): a, c, g or t
  modified_base (1521256)..(1521257): a, c, g or t
  modified_base (1521260)..(1521261): a, c, g or t
  modified_base (1521270)..(1521271): a, c, g or t
  modified_base (1521301)..(1521311): a, c, g or t
  modified_base (1521315)..(1521316): a, c, g or t
  modified_base (1521361)..(1521362): a, c, g or t
  modified_base (1521367)..(1521367): a, c, g or t
  modified_base (1521465)..(1521465): a, c, g or t
  modified_base (1521526)..(1521527): a, c, g or t
  modified_base (1521531)..(1521532): a, c, g or t
  modified_base (1521606)..(1521607): a, c, g or t
  modified_base (1521611)..(1521612): a, c, g or t
  modified_base (1521626)..(1521627): a, c, g or t
  modified_base (1521629)..(1521630): a, c, g or t
  modified_base (1521662)..(1521663): a, c, g or t
  modified_base (1521666)..(1521667): a, c, g or t
  modified_base (1521759)..(1521760): a, c, g or t
  modified_base (1521762)..(1521763): a, c, g or t
  modified_base (1522278)..(1522281): a, c, g or t
  modified_base (1522332)..(1522335): a, c, g or t
  modified_base (1522338)..(1522339): a, c, g or t
  modified_base (1522576)..(1522579): a, c, g or t
  modified_base (1522742)..(1522743): a, c, g or t
  modified_base (1522935)..(1522938): a, c, g or t
  modified_base (1522969)..(1522970): a, c, g or t
  modified_base (1522974)..(1523047): a, c, g or t
  modified_base (1523071)..(1523076): a, c, g or t
  modified_base (1523111)..(1523112): a, c, g or t
  modified_base (1523115)..(1523116): a, c, g or t
  modified_base (1523119)..(1523272): a, c, g or t
  modified_base (1523296)..(1523306): a, c, g or t
  modified_base (1523338)..(1523382): a, c, g or t
  modified_base (1523404)..(1523414): a, c, g or t
  modified_base (1523418)..(1523419): a, c, g or t
  modified_base (1523438)..(1523440): a, c, g or t
  modified_base (1523483)..(1523506): a, c, g or t
  modified_base (1523532)..(1524912): a, c, g or t
  modified_base (1524936)..(1524963): a, c, g or t
  modified_base (1524968)..(1524969): a, c, g or t
  modified_base (1524995)..(1524995): a, c, g or t
  modified_base (1525020)..(1525045): a, c, g or t
  modified_base (1525065)..(1525065): a, c, g or t
  modified_base (1525068)..(1525107): a, c, g or t
  modified_base (1525111)..(1525111): a, c, g or t
  modified_base (1525128)..(1525175): a, c, g or t
  modified_base (1525780)..(1525780): a, c, g or t
  modified_base (1526424)..(1526425): a, c, g or t
  modified_base (1526429)..(1526431): a, c, g or t
  modified_base (1526436)..(1526442): a, c, g or t
  modified_base (1526445)..(1526447): a, c, g or t
  modified_base (1526467)..(1526468): a, c, g or t
  modified_base (1526474)..(1526492): a, c, g or t
  modified_base (1526514)..(1526514): a, c, g or t
  modified_base (1526520)..(1526523): a, c, g or t
  modified_base (1526525)..(1526528): a, c, g or t
  modified_base (1526537)..(1526538): a, c, g or t
  modified_base (1526542)..(1526543): a, c, g or t
  modified_base (1526545)..(1526547): a, c, g or t
  modified_base (1526551)..(1526552): a, c, g or t
  modified_base (1526556)..(1526557): a, c, g or t
  modified_base (1526571)..(1526849): a, c, g or t
  modified_base (1526873)..(1527022): a, c, g or t
  modified_base (1527035)..(1527035): a, c, g or t
  modified_base (1527047)..(1527048): a, c, g or t
  modified_base (1527057)..(1527058): a, c, g or t
  modified_base (1527069)..(1527070): a, c, g or t
  modified_base (1528400)..(1528446): a, c, g or t
  modified_base (1528641)..(1528642): a, c, g or t
  modified_base (1528674)..(1528677): a, c, g or t
  modified_base (1528828)..(1528829): a, c, g or t
  modified_base (1528862)..(1528863): a, c, g or t
  modified_base (1529032)..(1529032): a, c, g or t
  modified_base (1529338)..(1529339): a, c, g or t
  modified_base (1529848)..(1529851): a, c, g or t
  modified_base (1529854)..(1529854): a, c, g or t
  modified_base (1530014)..(1530014): a, c, g or t
  modified_base (1530088)..(1530088): a, c, g or t
  modified_base (1530304)..(1530304): a, c, g or t
  modified_base (1530380)..(1530381): a, c, g or t
  modified_base (1530383)..(1530383): a, c, g or t
  modified_base (1530385)..(1530388): a, c, g or t
  modified_base (1530956)..(1530956): a, c, g or t
  modified_base (1531783)..(1531783): a, c, g or t
  modified_base (1531891)..(1531891): a, c, g or t
  modified_base (1531899)..(1531899): a, c, g or t
  modified_base (1532702)..(1532702): a, c, g or t
  modified_base (1536239)..(1536239): a, c, g or t
  modified_base (1536639)..(1536639): a, c, g or t
  modified_base (1537969)..(1537974): a, c, g or t
  modified_base (1537979)..(1537979): a, c, g or t
  modified_base (1538592)..(1538592): a, c, g or t
  modified_base (1539373)..(1539376): a, c, g or t
  modified_base (1540736)..(1540736): a, c, g or t
  modified_base (1540995)..(1540995): a, c, g or t
  modified_base (1540997)..(1541000): a, c, g or t
  modified_base (1541715)..(1541715): a, c, g or t
  modified_base (1542031)..(1542031): a, c, g or t
  modified_base (1543653)..(1543653): a, c, g or t
  modified_base (1544249)..(1544252): a, c, g or t
  modified_base (1545249)..(1545252): a, c, g or t
  modified_base (1545537)..(1545540): a, c, g or t
  modified_base (1547198)..(1547198): a, c, g or t
  modified_base (1547832)..(1547832): a, c, g or t
  modified_base (1549519)..(1549520): a, c, g or t
  modified_base (1550557)..(1550563): a, c, g or t
  modified_base (1552254)..(1552254): a, c, g or t
  modified_base (1552650)..(1552650): a, c, g or t
  modified_base (1553140)..(1553140): a, c, g or t
  modified_base (1555936)..(1555936): a, c, g or t
  modified_base (1558124)..(1558128): a, c, g or t
  modified_base (1563281)..(1563281): a, c, g or t
  modified_base (1563358)..(1563378): a, c, g or t
  modified_base (1565745)..(1565745): a, c, g or t
  modified_base (1566104)..(1566107): a, c, g or t
  modified_base (1566621)..(1566621): a, c, g or t
  modified_base (1566630)..(1566630): a, c, g or t
  modified_base (1567579)..(1567579): a, c, g or t
  modified_base (1568515)..(1568515): a, c, g or t
  modified_base (1568997)..(1568997): a, c, g or t
  modified_base (1569281)..(1569281): a, c, g or t
  modified_base (1570168)..(1570169): a, c, g or t
  modified_base (1570171)..(1570190): a, c, g or t
  modified_base (1573347)..(1573347): a, c, g or t
  modified_base (1573626)..(1573627): a, c, g or t
  modified_base (1573631)..(1573632): a, c, g or t
  modified_base (1573634)..(1573637): a, c, g or t
  modified_base (1577304)..(1577304): a, c, g or t
  modified_base (1577306)..(1577309): a, c, g or t
  modified_base (1579368)..(1579379): a, c, g or t
  modified_base (1579382)..(1579382): a, c, g or t
  modified_base (1581352)..(1581352): a, c, g or t
  modified_base (1581517)..(1581517): a, c, g or t
  modified_base (1581645)..(1581645): a, c, g or t
  modified_base (1581977)..(1581977): a, c, g or t
  modified_base (1583856)..(1583856): a, c, g or t
  modified_base (1584635)..(1584635): a, c, g or t
  modified_base (1585239)..(1585240): a, c, g or t
  modified_base (1585535)..(1585538): a, c, g or t
  modified_base (1588007)..(1588007): a, c, g or t
  modified_base (1588033)..(1588033): a, c, g or t
  modified_base (1588400)..(1588403): a, c, g or t
  modified_base (1591039)..(1591039): a, c, g or t
  modified_base (1591400)..(1591401): a, c, g or t
  modified_base (1591418)..(1591418): a, c, g or t
  modified_base (1593874)..(1593875): a, c, g or t
  modified_base (1593877)..(1593880): a, c, g or t
  modified_base (1597600)..(1597600): a, c, g or t
  modified_base (1598156)..(1598156): a, c, g or t
  modified_base (1598577)..(1598577): a, c, g or t
  modified_base (1599260)..(1599260): a, c, g or t
  modified_base (1600606)..(1600606): a, c, g or t
  modified_base (1601553)..(1601556): a, c, g or t
  modified_base (1602674)..(1602674): a, c, g or t
  modified_base (1602680)..(1602680): a, c, g or t
  modified_base (1602740)..(1602740): a, c, g or t
  modified_base (1605340)..(1605340): a, c, g or t
  modified_base (1606420)..(1606420): a, c, g or t
  modified_base (1608402)..(1608402): a, c, g or t
  modified_base (1609525)..(1609525): a, c, g or t
  modified_base (1609705)..(1609706): a, c, g or t
  modified_base (1610253)..(1610253): a, c, g or t
  modified_base (1613661)..(1613676): a, c, g or t
  modified_base (1615254)..(1615254): a, c, g or t
  modified_base (1615461)..(1615465): a, c, g or t
  modified_base (1617517)..(1617517): a, c, g or t
  modified_base (1619468)..(1619468): a, c, g or t
  modified_base (1619544)..(1619545): a, c, g or t
  modified_base (1619547)..(1619549): a, c, g or t
  modified_base (1619593)..(1619621): a, c, g or t
  modified_base (1619683)..(1619683): a, c, g or t
  modified_base (1622722)..(1622731): a, c, g or t
  modified_base (1622733)..(1622734): a, c, g or t
  modified_base (1623156)..(1623156): a, c, g or t
  modified_base (1628742)..(1628743): a, c, g or t
  modified_base (1631248)..(1631248): a, c, g or t
  modified_base (1632084)..(1632084): a, c, g or t
  modified_base (1633937)..(1633938): a, c, g or t
  modified_base (1636037)..(1636037): a, c, g or t
  modified_base (1636343)..(1636343): a, c, g or t
  modified_base (1636984)..(1636987): a, c, g or t
  modified_base (1637722)..(1637722): a, c, g or t
  modified_base (1637878)..(1637880): a, c, g or t
  modified_base (1638524)..(1638524): a, c, g or t
  modified_base (1640611)..(1640613): a, c, g or t
  modified_base (1640710)..(1640711): a, c, g or t
  modified_base (1640749)..(1640761): a, c, g or t
  modified_base (1641123)..(1641131): a, c, g or t
  modified_base (1642104)..(1642104): a, c, g or t
  modified_base (1642367)..(1642367): a, c, g or t
  modified_base (1643090)..(1643103): a, c, g or t
  modified_base (1643105)..(1643106): a, c, g or t
  modified_base (1643112)..(1643113): a, c, g or t
  modified_base (1643847)..(1643852): a, c, g or t
  modified_base (1646645)..(1646649): a, c, g or t
  modified_base (1646908)..(1646911): a, c, g or t
  modified_base (1648639)..(1648639): a, c, g or t
  modified_base (1649095)..(1649095): a, c, g or t
  modified_base (1649460)..(1649470): a, c, g or t
  modified_base (1655844)..(1655844): a, c, g or t
  modified_base (1655848)..(1655850): a, c, g or t
  modified_base (1656382)..(1656393): a, c, g or t
  modified_base (1657874)..(1657874): a, c, g or t
  modified_base (1660275)..(1660275): a, c, g or t
  modified_base (1661483)..(1661483): a, c, g or t
  modified_base (1661988)..(1661988): a, c, g or t
  modified_base (1662288)..(1662288): a, c, g or t
  modified_base (1662311)..(1662311): a, c, g or t
  modified_base (1662314)..(1662314): a, c, g or t
  modified_base (1664614)..(1664619): a, c, g or t
  modified_base (1666467)..(1666468): a, c, g or t
  modified_base (1666470)..(1666471): a, c, g or t
  modified_base (1667256)..(1667261): a, c, g or t
  modified_base (1672967)..(1672981): a, c, g or t
  modified_base (1673534)..(1673534): a, c, g or t
  modified_base (1673910)..(1673915): a, c, g or t
  modified_base (1674155)..(1674156): a, c, g or t
  modified_base (1674159)..(1674163): a, c, g or t
  modified_base (1678223)..(1678223): a, c, g or t
  modified_base (1680368)..(1680372): a, c, g or t
  modified_base (1682789)..(1682789): a, c, g or t
  modified_base (1684081)..(1684082): a, c, g or t
  modified_base (1684828)..(1684828): a, c, g or t
  modified_base (1686204)..(1686204): a, c, g or t
  modified_base (1687519)..(1687522): a, c, g or t
  modified_base (1694098)..(1694098): a, c, g or t
  modified_base (1696033)..(1696036): a, c, g or t
  modified_base (1696983)..(1696983): a, c, g or t
  modified_base (1698134)..(1698134): a, c, g or t
  modified_base (1699235)..(1699235): a, c, g or t
  modified_base (1699977)..(1699977): a, c, g or t
  modified_base (1700496)..(1700496): a, c, g or t
  modified_base (1701791)..(1701791): a, c, g or t
  modified_base (1702584)..(1702585): a, c, g or t
  modified_base (1702618)..(1702627): a, c, g or t
  modified_base (1702851)..(1702851): a, c, g or t
  modified_base (1704291)..(1704291): a, c, g or t
  modified_base (1704362)..(1704362): a, c, g or t
  modified_base (1706668)..(1706678): a, c, g or t
  modified_base (1706736)..(1706736): a, c, g or t
  modified_base (1706738)..(1706746): a, c, g or t
  modified_base (1711851)..(1711851): a, c, g or t
  modified_base (1712545)..(1712553): a, c, g or t
  modified_base (1712557)..(1712558): a, c, g or t
  modified_base (1712564)..(1712565): a, c, g or t
  modified_base (1712786)..(1712786): a, c, g or t
  modified_base (1712869)..(1712869): a, c, g or t
  modified_base (1713084)..(1713092): a, c, g or t
  modified_base (1713235)..(1713235): a, c, g or t
  modified_base (1713238)..(1713238): a, c, g or t
  modified_base (1713312)..(1713312): a, c, g or t
  modified_base (1713371)..(1713371): a, c, g or t
  modified_base (1713383)..(1713383): a, c, g or t
  modified_base (1713661)..(1713661): a, c, g or t
  modified_base (1715714)..(1715721): a, c, g or t
  modified_base (1716638)..(1716638): a, c, g or t
  modified_base (1716658)..(1716658): a, c, g or t
  modified_base (1716763)..(1716763): a, c, g or t
  modified_base (1717096)..(1717096): a, c, g or t
  modified_base (1717152)..(1717152): a, c, g or t
  modified_base (1717301)..(1717301): a, c, g or t
  modified_base (1717336)..(1717336): a, c, g or t
  modified_base (1717437)..(1717437): a, c, g or t
  modified_base (1717443)..(1717443): a, c, g or t
  modified_base (1717464)..(1717464): a, c, g or t
  modified_base (1717504)..(1717504): a, c, g or t
  modified_base (1717522)..(1717522): a, c, g or t
  modified_base (1717576)..(1717579): a, c, g or t
  modified_base (1717596)..(1717596): a, c, g or t
  modified_base (1717600)..(1717601): a, c, g or t
  modified_base (1717811)..(1717812): a, c, g or t
  modified_base (1717820)..(1717821): a, c, g or t
  modified_base (1718221)..(1718222): a, c, g or t
  modified_base (1718615)..(1718615): a, c, g or t
  modified_base (1718890)..(1718890): a, c, g or t
  modified_base (1719017)..(1719020): a, c, g or t
  modified_base (1719137)..(1719138): a, c, g or t
  modified_base (1719149)..(1719149): a, c, g or t
  modified_base (1719229)..(1719229): a, c, g or t
  modified_base (1719325)..(1719326): a, c, g or t
  modified_base (1719389)..(1719390): a, c, g or t
  modified_base (1719392)..(1719430): a, c, g or t
  modified_base (1719515)..(1719546): a, c, g or t
  modified_base (1719621)..(1719649): a, c, g or t
  modified_base (1719652)..(1719653): a, c, g or t
  modified_base (1719677)..(1719678): a, c, g or t
  modified_base (1719703)..(1719729): a, c, g or t
  modified_base (1719734)..(1719735): a, c, g or t
  modified_base (1719783)..(1719798): a, c, g or t
  modified_base (1719803)..(1719805): a, c, g or t
  modified_base (1719822)..(1719823): a, c, g or t
  modified_base (1719830)..(1719831): a, c, g or t
  modified_base (1719834)..(1719841): a, c, g or t
  modified_base (1719934)..(1719951): a, c, g or t
  modified_base (1720082)..(1720083): a, c, g or t
  modified_base (1720210)..(1720211): a, c, g or t
  modified_base (1720213)..(1720254): a, c, g or t
  modified_base (1720466)..(1720471): a, c, g or t
  modified_base (1720473)..(1720474): a, c, g or t
  modified_base (1720486)..(1720489): a, c, g or t
  modified_base (1720501)..(1720509): a, c, g or t
  modified_base (1720513)..(1720514): a, c, g or t
  modified_base (1720576)..(1720577): a, c, g or t
  modified_base (1720652)..(1720663): a, c, g or t
  modified_base (1720666)..(1720668): a, c, g or t
  modified_base (1720670)..(1720670): a, c, g or t
  modified_base (1720836)..(1720877): a, c, g or t
  modified_base (1720916)..(1720968): a, c, g or t
  modified_base (1721021)..(1721061): a, c, g or t
  modified_base (1721082)..(1721082): a, c, g or t
  modified_base (1721099)..(1721102): a, c, g or t
  modified_base (1721140)..(1721157): a, c, g or t
  modified_base (1721162)..(1721163): a, c, g or t
  modified_base (1721184)..(1721184): a, c, g or t
  modified_base (1721202)..(1721396): a, c, g or t
  modified_base (1721420)..(1721422): a, c, g or t
  modified_base (1721426)..(1721426): a, c, g or t
  modified_base (1721428)..(1721497): a, c, g or t
  modified_base (1721540)..(1721564): a, c, g or t
  modified_base (1721575)..(1721576): a, c, g or t
  modified_base (1721602)..(1721650): a, c, g or t
  modified_base (1721654)..(1721655): a, c, g or t
  modified_base (1721669)..(1721717): a, c, g or t
  modified_base (1721758)..(1721759): a, c, g or t
  modified_base (1721763)..(1721764): a, c, g or t
  modified_base (1721767)..(1721776): a, c, g or t
  modified_base (1721784)..(1721784): a, c, g or t
  modified_base (1721786)..(1721787): a, c, g or t
  modified_base (1721807)..(1721850): a, c, g or t
  modified_base (1721876)..(1721984): a, c, g or t
  modified_base (1722068)..(1722068): a, c, g or t
  modified_base (1722079)..(1722132): a, c, g or t
  modified_base (1722145)..(1722145): a, c, g or t
  modified_base (1722154)..(1722154): a, c, g or t
  modified_base (1722156)..(1722207): a, c, g or t
  modified_base (1722219)..(1722219): a, c, g or t
  modified_base (1722244)..(1722297): a, c, g or t
  modified_base (1722326)..(1722326): a, c, g or t
  modified_base (1722329)..(1722329): a, c, g or t
  modified_base (1722410)..(1722413): a, c, g or t
  modified_base (1722458)..(1722458): a, c, g or t
  modified_base (1722478)..(1722479): a, c, g or t
  modified_base (1722481)..(1722481): a, c, g or t
  modified_base (1722484)..(1722496): a, c, g or t
  modified_base (1722618)..(1722623): a, c, g or t
  modified_base (1722710)..(1722751): a, c, g or t
  modified_base (1722899)..(1722899): a, c, g or t
  modified_base (1722905)..(1722905): a, c, g or t
  modified_base (1722907)..(1722948): a, c, g or t
  modified_base (1722963)..(1722963): a, c, g or t
  modified_base (1723400)..(1723401): a, c, g or t
  modified_base (1723403)..(1723403): a, c, g or t
  modified_base (1723405)..(1723409): a, c, g or t
  modified_base (1723438)..(1723441): a, c, g or t
  modified_base (1723585)..(1723612): a, c, g or t
  modified_base (1723615)..(1723616): a, c, g or t
  modified_base (1723649)..(1723651): a, c, g or t
  modified_base (1723844)..(1723844): a, c, g or t
  modified_base (1723850)..(1723850): a, c, g or t
  modified_base (1723853)..(1723858): a, c, g or t
  modified_base (1723886)..(1723886): a, c, g or t
  modified_base (1723973)..(1723973): a, c, g or t
  modified_base (1724027)..(1724030): a, c, g or t
  modified_base (1724057)..(1724057): a, c, g or t
  modified_base (1724060)..(1724142): a, c, g or t
  modified_base (1724167)..(1724167): a, c, g or t
  modified_base (1724184)..(1724185): a, c, g or t
  modified_base (1724190)..(1724191): a, c, g or t
  modified_base (1724193)..(1724261): a, c, g or t
  modified_base (1724263)..(1724263): a, c, g or t
  modified_base (1724271)..(1724271): a, c, g or t
  modified_base (1724292)..(1724292): a, c, g or t
  modified_base (1724305)..(1724305): a, c, g or t
  modified_base (1724383)..(1724383): a, c, g or t
  modified_base (1724482)..(1724482): a, c, g or t
  modified_base (1724568)..(1724568): a, c, g or t
  modified_base (1724574)..(1724615): a, c, g or t
  modified_base (1724674)..(1724719): a, c, g or t
  modified_base (1724733)..(1724733): a, c, g or t
  modified_base (1724745)..(1724745): a, c, g or t
  modified_base (1724748)..(1724748): a, c, g or t
  modified_base (1724970)..(1724970): a, c, g or t
  modified_base (1724996)..(1724999): a, c, g or t
  modified_base (1725006)..(1725006): a, c, g or t
  modified_base (1725142)..(1725142): a, c, g or t
  modified_base (1725155)..(1725195): a, c, g or t
  modified_base (1725300)..(1725356): a, c, g or t
  modified_base (1725360)..(1725363): a, c, g or t
  modified_base (1725532)..(1725572): a, c, g or t
  modified_base (1725593)..(1725634): a, c, g or t
  modified_base (1725642)..(1725642): a, c, g or t
  modified_base (1725647)..(1725647): a, c, g or t
  modified_base (1725676)..(1725717): a, c, g or t
  modified_base (1725797)..(1725797): a, c, g or t
  modified_base (1725998)..(1725998): a, c, g or t
  modified_base (1726013)..(1726013): a, c, g or t
  modified_base (1726016)..(1726016): a, c, g or t
  modified_base (1726124)..(1726169): a, c, g or t
  modified_base (1726214)..(1726214): a, c, g or t
  modified_base (1726231)..(1726232): a, c, g or t
  modified_base (1726234)..(1726279): a, c, g or t
  modified_base (1726281)..(1726281): a, c, g or t
  modified_base (1726326)..(1726326): a, c, g or t
  modified_base (1726332)..(1726332): a, c, g or t
  modified_base (1726365)..(1726365): a, c, g or t
  modified_base (1726419)..(1726419): a, c, g or t
  modified_base (1726461)..(1726503): a, c, g or t
  modified_base (1726525)..(1726525): a, c, g or t
  modified_base (1726539)..(1726542): a, c, g or t
  modified_base (1726579)..(1726579): a, c, g or t
  modified_base (1726594)..(1726594): a, c, g or t
  modified_base (1726596)..(1726597): a, c, g or t
  modified_base (1726669)..(1726669): a, c, g or t
  modified_base (1726686)..(1726727): a, c, g or t
  modified_base (1726780)..(1726780): a, c, g or t
  modified_base (1726843)..(1726885): a, c, g or t
  modified_base (1727024)..(1727068): a, c, g or t
  modified_base (1727076)..(1727078): a, c, g or t
  modified_base (1727123)..(1727162): a, c, g or t
  modified_base (1727188)..(1727190): a, c, g or t
  modified_base (1727192)..(1727198): a, c, g or t
  modified_base (1727997)..(1728040): a, c, g or t
  modified_base (1728092)..(1728142): a, c, g or t
  modified_base (1728345)..(1728345): a, c, g or t
  modified_base (1728352)..(1728394): a, c, g or t
  modified_base (1729055)..(1729101): a, c, g or t
  modified_base (1729106)..(1729107): a, c, g or t
  modified_base (1729118)..(1729118): a, c, g or t
  modified_base (1729125)..(1729247): a, c, g or t
  modified_base (1729334)..(1729375): a, c, g or t
  modified_base (1729400)..(1729437): a, c, g or t
  modified_base (1729457)..(1729497): a, c, g or t
  modified_base (1729627)..(1729627): a, c, g or t
  modified_base (1729871)..(1729875): a, c, g or t
  modified_base (1730030)..(1730030): a, c, g or t
  modified_base (1730039)..(1730039): a, c, g or t
  modified_base (1730041)..(1730042): a, c, g or t
  modified_base (1730046)..(1730046): a, c, g or t
  modified_base (1730393)..(1730393): a, c, g or t
  modified_base (1730396)..(1730396): a, c, g or t
  modified_base (1730403)..(1730406): a, c, g or t
  modified_base (1730509)..(1730509): a, c, g or t
  modified_base (1730973)..(1730973): a, c, g or t
  modified_base (1731592)..(1731593): a, c, g or t
  modified_base (1731985)..(1731985): a, c, g or t
  modified_base (1732375)..(1732375): a, c, g or t
  modified_base (1732378)..(1732378): a, c, g or t
  modified_base (1732544)..(1732544): a, c, g or t
  modified_base (1732570)..(1732573): a, c, g or t
  modified_base (1732581)..(1732581): a, c, g or t
  modified_base (1732913)..(1732913): a, c, g or t
  modified_base (1733050)..(1733050): a, c, g or t
  modified_base (1733063)..(1733063): a, c, g or t
  modified_base (1733084)..(1733084): a, c, g or t
  modified_base (1733088)..(1733088): a, c, g or t
  modified_base (1733189)..(1733189): a, c, g or t
  modified_base (1735459)..(1735459): a, c, g or t
  modified_base (1735585)..(1735585): a, c, g or t
  modified_base (1735712)..(1735712): a, c, g or t
  modified_base (1735895)..(1735895): a, c, g or t
  modified_base (1735940)..(1735940): a, c, g or t
  modified_base (1736132)..(1736132): a, c, g or t
  modified_base (1736158)..(1736165): a, c, g or t
  modified_base (1736263)..(1736263): a, c, g or t
  modified_base (1736303)..(1736315): a, c, g or t
  modified_base (1736352)..(1736352): a, c, g or t
  modified_base (1736547)..(1736547): a, c, g or t
  modified_base (1737058)..(1737058): a, c, g or t
  modified_base (1737133)..(1737133): a, c, g or t
  modified_base (1737178)..(1737178): a, c, g or t
  modified_base (1737189)..(1737189): a, c, g or t
  modified_base (1737201)..(1737204): a, c, g or t
  modified_base (1737314)..(1737318): a, c, g or t
  modified_base (1737330)..(1737330): a, c, g or t
  modified_base (1737452)..(1737452): a, c, g or t
  modified_base (1737497)..(1737497): a, c, g or t
  modified_base (1737831)..(1737831): a, c, g or t
  modified_base (1737875)..(1737875): a, c, g or t
  modified_base (1737894)..(1737894): a, c, g or t
  modified_base (1737935)..(1737935): a, c, g or t
  modified_base (1737956)..(1737974): a, c, g or t
  modified_base (1737992)..(1737993): a, c, g or t
  modified_base (1738001)..(1738002): a, c, g or t
  modified_base (1738006)..(1738006): a, c, g or t
  modified_base (1738071)..(1738071): a, c, g or t
  modified_base (1738083)..(1738083): a, c, g or t
  modified_base (1738125)..(1738125): a, c, g or t
  modified_base (1738138)..(1738138): a, c, g or t
  modified_base (1738156)..(1738156): a, c, g or t
  modified_base (1738194)..(1738194): a, c, g or t
  modified_base (1738281)..(1738281): a, c, g or t
  modified_base (1738370)..(1738370): a, c, g or t
  modified_base (1738376)..(1738376): a, c, g or t
  modified_base (1738441)..(1738441): a, c, g or t
  modified_base (1738462)..(1738463): a, c, g or t
  modified_base (1738465)..(1738467): a, c, g or t
  modified_base (1738528)..(1738528): a, c, g or t
  modified_base (1738543)..(1738543): a, c, g or t
  modified_base (1738596)..(1738596): a, c, g or t
  modified_base (1738686)..(1738686): a, c, g or t
  modified_base (1738698)..(1738698): a, c, g or t
  modified_base (1738726)..(1738726): a, c, g or t
  modified_base (1738780)..(1738835): a, c, g or t
  modified_base (1738863)..(1738918): a, c, g or t
  modified_base (1738922)..(1738923): a, c, g or t
  modified_base (1738927)..(1738928): a, c, g or t
  modified_base (1738964)..(1739004): a, c, g or t
  modified_base (1739026)..(1739068): a, c, g or t
  modified_base (1739070)..(1739071): a, c, g or t
  modified_base (1739090)..(1739096): a, c, g or t
  modified_base (1739126)..(1739126): a, c, g or t
  modified_base (1739181)..(1739224): a, c, g or t
  modified_base (1739233)..(1739233): a, c, g or t
  modified_base (1739280)..(1739280): a, c, g or t
  modified_base (1739283)..(1739283): a, c, g or t
  modified_base (1739322)..(1739322): a, c, g or t
  modified_base (1739364)..(1739364): a, c, g or t
  modified_base (1739484)..(1739484): a, c, g or t
  modified_base (1739488)..(1739499): a, c, g or t
  modified_base (1739507)..(1739510): a, c, g or t
  modified_base (1739553)..(1739553): a, c, g or t
  modified_base (1739610)..(1739610): a, c, g or t
  modified_base (1739613)..(1739613): a, c, g or t
  modified_base (1739628)..(1739628): a, c, g or t
  modified_base (1739633)..(1739633): a, c, g or t
  modified_base (1739661)..(1739661): a, c, g or t
  modified_base (1739757)..(1739763): a, c, g or t
  modified_base (1739812)..(1739909): a, c, g or t
  modified_base (1739934)..(1739976): a, c, g or t
  modified_base (1740136)..(1740136): a, c, g or t
  modified_base (1740187)..(1740204): a, c, g or t
  modified_base (1740238)..(1740238): a, c, g or t
  modified_base (1740343)..(1740343): a, c, g or t
  modified_base (1740410)..(1740410): a, c, g or t
  modified_base (1740413)..(1740452): a, c, g or t
  modified_base (1740454)..(1740454): a, c, g or t
  modified_base (1740599)..(1740640): a, c, g or t
  modified_base (1740661)..(1740664): a, c, g or t
  modified_base (1740735)..(1740735): a, c, g or t
  modified_base (1740756)..(1740756): a, c, g or t
  modified_base (1740761)..(1740764): a, c, g or t
  modified_base (1740766)..(1740783): a, c, g or t
  modified_base (1740865)..(1740904): a, c, g or t
  modified_base (1740907)..(1740908): a, c, g or t
  modified_base (1740987)..(1740987): a, c, g or t
  modified_base (1741043)..(1741043): a, c, g or t
  modified_base (1741048)..(1741051): a, c, g or t
  modified_base (1741060)..(1741101): a, c, g or t
  modified_base (1741147)..(1741150): a, c, g or t
  modified_base (1741157)..(1741213): a, c, g or t
  modified_base (1741240)..(1741240): a, c, g or t
  modified_base (1741254)..(1741257): a, c, g or t
  modified_base (1741262)..(1741265): a, c, g or t
  modified_base (1742333)..(1742334): a, c, g or t
  modified_base (1742457)..(1742472): a, c, g or t
  modified_base (1742479)..(1742480): a, c, g or t
  modified_base (1742515)..(1742528): a, c, g or t
  modified_base (1742535)..(1742536): a, c, g or t
  modified_base (1742543)..(1742543): a, c, g or t
  modified_base (1742548)..(1742551): a, c, g or t
  modified_base (1742782)..(1742794): a, c, g or t
  modified_base (1742816)..(1742820): a, c, g or t
  modified_base (1742921)..(1742968): a, c, g or t
  modified_base (1742986)..(1742987): a, c, g or t
  modified_base (1743043)..(1743043): a, c, g or t
  modified_base (1744467)..(1744468): a, c, g or t
  modified_base (1744503)..(1744504): a, c, g or t
  modified_base (1744509)..(1744510): a, c, g or t
  modified_base (1744545)..(1744545): a, c, g or t
  modified_base (1744550)..(1744551): a, c, g or t
  modified_base (1744590)..(1744598): a, c, g or t
  modified_base (1744750)..(1744751): a, c, g or t
  modified_base (1744759)..(1744769): a, c, g or t
  modified_base (1744778)..(1744779): a, c, g or t
  modified_base (1744934)..(1744936): a, c, g or t
  modified_base (1744965)..(1744978): a, c, g or t
  modified_base (1744985)..(1744986): a, c, g or t
  modified_base (1745043)..(1745060): a, c, g or t
  modified_base (1745084)..(1745084): a, c, g or t
  modified_base (1745133)..(1745152): a, c, g or t
  modified_base (1745440)..(1745441): a, c, g or t
  modified_base (1745512)..(1745514): a, c, g or t
  modified_base (1745516)..(1745522): a, c, g or t
  modified_base (1745524)..(1745525): a, c, g or t
  modified_base (1745561)..(1745572): a, c, g or t
  modified_base (1745923)..(1745923): a, c, g or t
  modified_base (1745942)..(1745943): a, c, g or t
  modified_base (1746578)..(1746586): a, c, g or t
  modified_base (1746591)..(1746592): a, c, g or t
  modified_base (1746607)..(1746646): a, c, g or t
  modified_base (1746662)..(1746665): a, c, g or t
  modified_base (1746668)..(1746668): a, c, g or t
  modified_base (1746670)..(1746671): a, c, g or t
  modified_base (1746683)..(1746684): a, c, g or t
  modified_base (1746693)..(1746761): a, c, g or t
  modified_base (1746763)..(1746764): a, c, g or t
  modified_base (1746767)..(1746768): a, c, g or t
  modified_base (1746772)..(1746773): a, c, g or t
  modified_base (1746844)..(1746845): a, c, g or t
  modified_base (1746849)..(1746850): a, c, g or t
  modified_base (1746905)..(1746906): a, c, g or t
  modified_base (1747030)..(1747031): a, c, g or t
  modified_base (1747042)..(1747050): a, c, g or t
  modified_base (1747205)..(1747238): a, c, g or t
  modified_base (1747329)..(1747428): a, c, g or t
  modified_base (1747470)..(1747500): a, c, g or t
  modified_base (1747524)..(1747615): a, c, g or t
  modified_base (1747641)..(1747642): a, c, g or t
  modified_base (1747667)..(1747675): a, c, g or t
  modified_base (1747699)..(1747742): a, c, g or t
  modified_base (1747764)..(1747765): a, c, g or t
  modified_base (1747777)..(1747777): a, c, g or t
  modified_base (1747792)..(1747808): a, c, g or t
  modified_base (1747832)..(1747833): a, c, g or t
  modified_base (1747857)..(1747864): a, c, g or t
  modified_base (1747866)..(1747867): a, c, g or t
  modified_base (1747897)..(1747900): a, c, g or t
  modified_base (1747904)..(1747905): a, c, g or t
  modified_base (1747944)..(1747945): a, c, g or t
  modified_base (1747947)..(1747948): a, c, g or t
  modified_base (1747954)..(1747978): a, c, g or t
  modified_base (1748023)..(1748024): a, c, g or t
  modified_base (1748027)..(1748028): a, c, g or t
  modified_base (1748065)..(1748075): a, c, g or t
  modified_base (1748077)..(1748078): a, c, g or t
  modified_base (1748087)..(1748088): a, c, g or t
  modified_base (1748124)..(1748125): a, c, g or t
  modified_base (1748128)..(1748149): a, c, g or t
  modified_base (1748194)..(1748222): a, c, g or t
  modified_base (1748226)..(1748227): a, c, g or t
  modified_base (1748233)..(1748234): a, c, g or t
  modified_base (1748281)..(1748285): a, c, g or t
  modified_base (1748302)..(1748311): a, c, g or t
  modified_base (1748353)..(1748397): a, c, g or t
  modified_base (1748417)..(1748418): a, c, g or t
  modified_base (1748420)..(1748424): a, c, g or t
  modified_base (1748447)..(1748450): a, c, g or t
  modified_base (1748452)..(1748493): a, c, g or t
  modified_base (1748516)..(1748531): a, c, g or t
  modified_base (1748543)..(1748543): a, c, g or t
  modified_base (1748551)..(1748597): a, c, g or t
  modified_base (1748609)..(1748610): a, c, g or t
  modified_base (1748617)..(1748821): a, c, g or t
  modified_base (1748841)..(1748960): a, c, g or t
  modified_base (1749006)..(1749045): a, c, g or t
  modified_base (1749065)..(1749065): a, c, g or t
  modified_base (1749073)..(1749116): a, c, g or t
  modified_base (1749129)..(1749133): a, c, g or t
  modified_base (1749139)..(1749178): a, c, g or t
  modified_base (1749238)..(1749238): a, c, g or t
  modified_base (1749262)..(1749262): a, c, g or t
  modified_base (1749292)..(1749624): a, c, g or t
  modified_base (1749626)..(1749626): a, c, g or t
  modified_base (1749638)..(1749638): a, c, g or t
  modified_base (1749647)..(1749758): a, c, g or t
  modified_base (1749779)..(1749884): a, c, g or t
  modified_base (1749899)..(1749899): a, c, g or t
  modified_base (1749902)..(1749902): a, c, g or t
  modified_base (1749914)..(1749914): a, c, g or t
  modified_base (1749953)..(1749995): a, c, g or t
  modified_base (1750018)..(1750058): a, c, g or t
  modified_base (1751114)..(1751115): a, c, g or t
  modified_base (1751120)..(1751121): a, c, g or t
  modified_base (1751871)..(1751899): a, c, g or t
  modified_base (1753723)..(1753723): a, c, g or t
  modified_base (1753823)..(1753823): a, c, g or t
  modified_base (1756231)..(1756232): a, c, g or t
  modified_base (1758435)..(1758440): a, c, g or t
  modified_base (1759960)..(1759971): a, c, g or t
  modified_base (1761443)..(1761443): a, c, g or t
  modified_base (1761504)..(1761507): a, c, g or t
  modified_base (1762415)..(1762418): a, c, g or t
  modified_base (1762496)..(1762496): a, c, g or t
  modified_base (1762548)..(1762548): a, c, g or t
  modified_base (1770520)..(1770520): a, c, g or t
  modified_base (1771506)..(1771509): a, c, g or t
  modified_base (1772684)..(1772684): a, c, g or t
  modified_base (1775665)..(1775665): a, c, g or t
  modified_base (1777211)..(1777211): a, c, g or t
  modified_base (1778448)..(1778448): a, c, g or t
  modified_base (1778474)..(1778474): a, c, g or t
  modified_base (1778708)..(1778708): a, c, g or t
  modified_base (1780570)..(1780571): a, c, g or t
  modified_base (1785668)..(1785668): a, c, g or t
  modified_base (1787149)..(1787149): a, c, g or t
  modified_base (1787153)..(1787156): a, c, g or t
  modified_base (1788861)..(1788861): a, c, g or t
  modified_base (1790320)..(1790320): a, c, g or t
  modified_base (1791784)..(1791788): a, c, g or t
  modified_base (1793265)..(1793265): a, c, g or t
  modified_base (1795305)..(1795305): a, c, g or t
  modified_base (1796078)..(1796082): a, c, g or t
  modified_base (1797138)..(1797138): a, c, g or t
  modified_base (1798179)..(1798179): a, c, g or t
  modified_base (1799564)..(1799564): a, c, g or t
  modified_base (1800663)..(1800663): a, c, g or t
  modified_base (1801061)..(1801064): a, c, g or t
  modified_base (1801384)..(1801389): a, c, g or t
  modified_base (1802481)..(1802481): a, c, g or t
  modified_base (1803077)..(1803077): a, c, g or t
  modified_base (1803299)..(1803299): a, c, g or t
  modified_base (1803504)..(1803504): a, c, g or t
  modified_base (1804236)..(1804236): a, c, g or t
  modified_base (1804263)..(1804263): a, c, g or t
  modified_base (1804949)..(1804949): a, c, g or t
  modified_base (1806612)..(1806612): a, c, g or t
  modified_base (1806798)..(1806801): a, c, g or t
  modified_base (1808311)..(1808312): a, c, g or t
  modified_base (1808649)..(1808649): a, c, g or t
  modified_base (1808693)..(1808693): a, c, g or t
  modified_base (1808844)..(1808856): a, c, g or t
  modified_base (1811152)..(1811152): a, c, g or t
  modified_base (1811613)..(1811627): a, c, g or t
  modified_base (1813382)..(1813382): a, c, g or t
  modified_base (1814805)..(1814805): a, c, g or t
  modified_base (1815824)..(1815827): a, c, g or t
  modified_base (1818434)..(1818435): a, c, g or t
  modified_base (1819630)..(1819630): a, c, g or t
  modified_base (1820185)..(1820185): a, c, g or t
  modified_base (1823073)..(1823076): a, c, g or t
  modified_base (1823155)..(1823155): a, c, g or t
  modified_base (1824453)..(1824453): a, c, g or t
  modified_base (1824515)..(1824515): a, c, g or t
  modified_base (1825126)..(1825126): a, c, g or t
  modified_base (1825417)..(1825426): a, c, g or t
  modified_base (1826311)..(1826311): a, c, g or t
  modified_base (1827543)..(1827543): a, c, g or t
  modified_base (1828933)..(1828936): a, c, g or t
  modified_base (1831571)..(1831574): a, c, g or t
  modified_base (1832122)..(1832124): a, c, g or t
  modified_base (1832838)..(1832838): a, c, g or t
  modified_base (1833855)..(1833855): a, c, g or t
  modified_base (1834035)..(1834037): a, c, g or t
  modified_base (1834064)..(1834067): a, c, g or t
  modified_base (1835485)..(1835486): a, c, g or t
  modified_base (1842814)..(1842814): a, c, g or t
  modified_base (1849436)..(1849436): a, c, g or t
  modified_base (1849546)..(1849551): a, c, g or t
  modified_base (1850015)..(1850020): a, c, g or t
  modified_base (1850343)..(1850343): a, c, g or t
  modified_base (1851329)..(1851329): a, c, g or t
  modified_base (1851379)..(1851382): a, c, g or t
  modified_base (1852962)..(1852962): a, c, g or t
  modified_base (1853342)..(1853342): a, c, g or t
  modified_base (1854049)..(1854049): a, c, g or t
  modified_base (1854929)..(1854929): a, c, g or t
  modified_base (1857199)..(1857199): a, c, g or t
  modified_base (1858480)..(1858519): a, c, g or t
  modified_base (1858943)..(1858946): a, c, g or t
  modified_base (1861350)..(1861351): a, c, g or t
  modified_base (1861375)..(1861375): a, c, g or t
  modified_base (1862258)..(1862259): a, c, g or t
  modified_base (1862263)..(1862264): a, c, g or t
  modified_base (1862271)..(1862288): a, c, g or t
  modified_base (1862967)..(1862967): a, c, g or t
  modified_base (1863018)..(1863018): a, c, g or t
  modified_base (1863029)..(1863029): a, c, g or t
  modified_base (1863233)..(1863233): a, c, g or t
  modified_base (1863405)..(1863405): a, c, g or t
  modified_base (1863519)..(1863521): a, c, g or t
  modified_base (1863549)..(1863554): a, c, g or t
  modified_base (1863559)..(1863559): a, c, g or t
  modified_base (1863587)..(1863626): a, c, g or t
  modified_base (1863719)..(1863767): a, c, g or t
  modified_base (1863851)..(1863891): a, c, g or t
  modified_base (1863915)..(1863920): a, c, g or t
  modified_base (1863932)..(1863971): a, c, g or t
  modified_base (1864060)..(1864060): a, c, g or t
  modified_base (1864156)..(1864195): a, c, g or t
  modified_base (1864223)..(1864228): a, c, g or t
  modified_base (1864234)..(1864238): a, c, g or t
  modified_base (1864269)..(1864331): a, c, g or t
  modified_base (1864341)..(1864341): a, c, g or t
  modified_base (1864405)..(1864451): a, c, g or t
  modified_base (1864473)..(1864631): a, c, g or t
  modified_base (1864655)..(1864677): a, c, g or t
  modified_base (1864692)..(1864695): a, c, g or t
  modified_base (1864701)..(1864725): a, c, g or t
  modified_base (1864752)..(1864792): a, c, g or t
  modified_base (1864795)..(1864796): a, c, g or t
  modified_base (1864921)..(1864921): a, c, g or t
  modified_base (1864927)..(1864928): a, c, g or t
  modified_base (1864933)..(1864934): a, c, g or t
  modified_base (1864970)..(1865016): a, c, g or t
  modified_base (1865028)..(1865029): a, c, g or t
  modified_base (1865040)..(1865043): a, c, g or t
  modified_base (1865066)..(1865067): a, c, g or t
  modified_base (1865093)..(1865132): a, c, g or t
  modified_base (1865170)..(1865170): a, c, g or t
  modified_base (1865172)..(1865210): a, c, g or t
  modified_base (1865298)..(1865348): a, c, g or t
  modified_base (1865398)..(1865544): a, c, g or t
  modified_base (1865567)..(1865626): a, c, g or t
  modified_base (1865641)..(1865641): a, c, g or t
  modified_base (1865652)..(1865676): a, c, g or t
  modified_base (1865704)..(1865744): a, c, g or t
  modified_base (1865769)..(1865772): a, c, g or t
  modified_base (1865794)..(1865833): a, c, g or t
  modified_base (1865845)..(1865845): a, c, g or t
  modified_base (1865900)..(1865900): a, c, g or t
  modified_base (1865917)..(1865917): a, c, g or t
  modified_base (1865929)..(1865929): a, c, g or t
  modified_base (1865938)..(1865938): a, c, g or t
  modified_base (1865985)..(1865985): a, c, g or t
  modified_base (1866030)..(1866030): a, c, g or t
  modified_base (1866035)..(1866102): a, c, g or t
  modified_base (1866167)..(1866168): a, c, g or t
  modified_base (1866171)..(1866172): a, c, g or t
  modified_base (1866178)..(1866252): a, c, g or t
  modified_base (1866271)..(1866275): a, c, g or t
  modified_base (1866282)..(1866304): a, c, g or t
  modified_base (1866333)..(1866428): a, c, g or t
  modified_base (1866449)..(1866523): a, c, g or t
  modified_base (1866540)..(1866543): a, c, g or t
  modified_base (1866639)..(1866641): a, c, g or t
  modified_base (1866693)..(1866693): a, c, g or t
  modified_base (1866712)..(1866712): a, c, g or t
  modified_base (1866742)..(1866782): a, c, g or t
  modified_base (1866785)..(1866785): a, c, g or t
  modified_base (1866839)..(1866891): a, c, g or t
  modified_base (1866937)..(1866962): a, c, g or t
  modified_base (1866964)..(1866967): a, c, g or t
  modified_base (1866998)..(1866998): a, c, g or t
  modified_base (1867000)..(1867047): a, c, g or t
  modified_base (1867071)..(1867156): a, c, g or t
  modified_base (1867173)..(1867174): a, c, g or t
  modified_base (1867179)..(1867239): a, c, g or t
  modified_base (1867255)..(1867255): a, c, g or t
  modified_base (1867263)..(1867323): a, c, g or t
  modified_base (1867347)..(1867365): a, c, g or t
  modified_base (1867370)..(1867371): a, c, g or t
  modified_base (1867399)..(1867400): a, c, g or t
  modified_base (1867403)..(1867622): a, c, g or t
  modified_base (1867649)..(1867654): a, c, g or t
  modified_base (1867680)..(1867680): a, c, g or t
  modified_base (1867682)..(1867683): a, c, g or t
  modified_base (1867736)..(1867948): a, c, g or t
  modified_base (1867972)..(1868043): a, c, g or t
  modified_base (1868067)..(1868068): a, c, g or t
  modified_base (1868100)..(1868174): a, c, g or t
  modified_base (1868186)..(1868187): a, c, g or t
  modified_base (1868204)..(1868205): a, c, g or t
  modified_base (1868211)..(1868319): a, c, g or t
  modified_base (1868342)..(1868385): a, c, g or t
  modified_base (1868407)..(1868407): a, c, g or t
  modified_base (1868433)..(1868511): a, c, g or t
  modified_base (1868532)..(1868590): a, c, g or t
  modified_base (1868635)..(1869460): a, c, g or t
  modified_base (1869494)..(1869495): a, c, g or t
  modified_base (1869500)..(1869559): a, c, g or t
  modified_base (1869581)..(1869582): a, c, g or t
  modified_base (1869586)..(1869587): a, c, g or t
  modified_base (1869590)..(1869590): a, c, g or t
  modified_base (1869596)..(1869596): a, c, g or t
  modified_base (1869606)..(1869674): a, c, g or t
  modified_base (1869979)..(1869980): a, c, g or t
  modified_base (1870059)..(1870059): a, c, g or t
  modified_base (1870073)..(1870075): a, c, g or t
  modified_base (1870077)..(1870080): a, c, g or t
  modified_base (1870083)..(1870084): a, c, g or t
  modified_base (1870266)..(1870266): a, c, g or t
  modified_base (1870554)..(1870554): a, c, g or t
  modified_base (1871221)..(1871223): a, c, g or t
  modified_base (1871566)..(1871567): a, c, g or t
  modified_base (1871574)..(1871581): a, c, g or t
  modified_base (1873259)..(1873260): a, c, g or t
  modified_base (1873264)..(1873265): a, c, g or t
  modified_base (1873611)..(1873649): a, c, g or t
  modified_base (1875372)..(1875409): a, c, g or t
  modified_base (1875462)..(1875471): a, c, g or t
  modified_base (1875587)..(1875588): a, c, g or t
  modified_base (1875676)..(1875722): a, c, g or t
  modified_base (1875801)..(1875842): a, c, g or t
  modified_base (1875864)..(1875880): a, c, g or t
  modified_base (1875904)..(1875993): a, c, g or t
  modified_base (1876020)..(1876033): a, c, g or t
  modified_base (1876035)..(1876036): a, c, g or t
  modified_base (1876044)..(1876045): a, c, g or t
  modified_base (1876057)..(1876061): a, c, g or t
  modified_base (1876092)..(1876095): a, c, g or t
  modified_base (1876107)..(1876108): a, c, g or t
  modified_base (1876121)..(1876122): a, c, g or t
  modified_base (1876125)..(1876126): a, c, g or t
  modified_base (1876128)..(1876129): a, c, g or t
  modified_base (1876197)..(1876237): a, c, g or t
  modified_base (1876325)..(1876328): a, c, g or t
  modified_base (1876330)..(1876331): a, c, g or t
  modified_base (1876355)..(1876359): a, c, g or t
  modified_base (1876430)..(1876431): a, c, g or t
  modified_base (1876443)..(1876474): a, c, g or t
  modified_base (1876630)..(1876648): a, c, g or t
  modified_base (1876702)..(1876702): a, c, g or t
  modified_base (1876737)..(1876738): a, c, g or t
  modified_base (1876744)..(1876750): a, c, g or t
  modified_base (1876753)..(1876757): a, c, g or t
  modified_base (1876759)..(1876760): a, c, g or t
  modified_base (1876771)..(1876817): a, c, g or t
  modified_base (1876853)..(1876874): a, c, g or t
  modified_base (1876935)..(1876936): a, c, g or t
  modified_base (1876938)..(1876939): a, c, g or t
  modified_base (1876951)..(1876980): a, c, g or t
  modified_base (1876991)..(1876992): a, c, g or t
  modified_base (1877018)..(1877018): a, c, g or t
  modified_base (1877034)..(1877035): a, c, g or t
  modified_base (1877042)..(1877042): a, c, g or t
  modified_base (1877049)..(1877050): a, c, g or t
  modified_base (1877052)..(1877070): a, c, g or t
  modified_base (1877091)..(1877092): a, c, g or t
  modified_base (1877094)..(1877113): a, c, g or t
  modified_base (1877129)..(1877130): a, c, g or t
  modified_base (1877134)..(1877135): a, c, g or t
  modified_base (1877137)..(1877161): a, c, g or t
  modified_base (1877172)..(1877173): a, c, g or t
  modified_base (1877186)..(1877186): a, c, g or t
  modified_base (1877266)..(1877269): a, c, g or t
  modified_base (1877319)..(1877320): a, c, g or t
  modified_base (1877332)..(1877333): a, c, g or t
  modified_base (1877393)..(1877409): a, c, g or t
  modified_base (1877412)..(1877415): a, c, g or t
  modified_base (1877441)..(1877467): a, c, g or t
  modified_base (1877762)..(1877763): a, c, g or t
  modified_base (1877869)..(1877878): a, c, g or t
  modified_base (1877881)..(1877882): a, c, g or t
  modified_base (1877894)..(1877895): a, c, g or t
  modified_base (1877927)..(1877928): a, c, g or t
  modified_base (1877992)..(1877993): a, c, g or t
  modified_base (1878044)..(1878045): a, c, g or t
  modified_base (1878047)..(1878085): a, c, g or t
  modified_base (1878096)..(1878097): a, c, g or t
  modified_base (1878109)..(1878120): a, c, g or t
  modified_base (1878129)..(1878130): a, c, g or t
  modified_base (1878136)..(1878137): a, c, g or t
  modified_base (1878146)..(1878179): a, c, g or t
  modified_base (1878325)..(1878326): a, c, g or t
  modified_base (1878328)..(1878338): a, c, g or t
  modified_base (1878341)..(1878342): a, c, g or t
  modified_base (1878366)..(1878411): a, c, g or t
  modified_base (1878428)..(1878429): a, c, g or t
  modified_base (1878436)..(1878437): a, c, g or t
  modified_base (1878439)..(1878440): a, c, g or t
  modified_base (1878444)..(1878445): a, c, g or t
  modified_base (1878502)..(1878517): a, c, g or t
  modified_base (1878541)..(1878554): a, c, g or t
  modified_base (1878582)..(1878689): a, c, g or t
  modified_base (1878693)..(1878694): a, c, g or t
  modified_base (1878713)..(1878724): a, c, g or t
  modified_base (1878727)..(1878727): a, c, g or t
  modified_base (1878790)..(1878795): a, c, g or t
  modified_base (1878874)..(1878874): a, c, g or t
  modified_base (1878917)..(1878917): a, c, g or t
  modified_base (1879077)..(1879087): a, c, g or t
  modified_base (1879097)..(1879098): a, c, g or t
  modified_base (1879185)..(1879189): a, c, g or t
  modified_base (1879253)..(1879253): a, c, g or t
  modified_base (1879350)..(1879376): a, c, g or t
  modified_base (1879459)..(1879460): a, c, g or t
  modified_base (1879560)..(1879572): a, c, g or t
  modified_base (1879577)..(1879579): a, c, g or t
  modified_base (1879596)..(1879599): a, c, g or t
  modified_base (1879729)..(1879748): a, c, g or t
  modified_base (1879861)..(1879861): a, c, g or t
  modified_base (1879931)..(1879995): a, c, g or t
  modified_base (1880040)..(1880085): a, c, g or t
  modified_base (1880161)..(1880161): a, c, g or t
  modified_base (1880193)..(1880235): a, c, g or t
  modified_base (1880362)..(1880429): a, c, g or t
  modified_base (1880558)..(1880620): a, c, g or t
  modified_base (1880638)..(1880638): a, c, g or t
  modified_base (1880646)..(1880649): a, c, g or t
  modified_base (1880691)..(1880730): a, c, g or t
  modified_base (1880755)..(1880757): a, c, g or t
  modified_base (1880787)..(1880788): a, c, g or t
  modified_base (1880805)..(1880805): a, c, g or t
  modified_base (1880809)..(1880810): a, c, g or t
  modified_base (1880812)..(1880913): a, c, g or t
  modified_base (1880939)..(1880991): a, c, g or t
  modified_base (1880994)..(1880995): a, c, g or t
  modified_base (1881020)..(1881020): a, c, g or t
  modified_base (1881106)..(1881107): a, c, g or t
  modified_base (1881111)..(1881114): a, c, g or t
  modified_base (1881117)..(1881118): a, c, g or t
  modified_base (1881121)..(1881148): a, c, g or t
  modified_base (1881152)..(1881152): a, c, g or t
  modified_base (1881182)..(1881194): a, c, g or t
  modified_base (1881246)..(1881252): a, c, g or t
  modified_base (1881300)..(1881353): a, c, g or t
  modified_base (1881379)..(1881380): a, c, g or t
  modified_base (1881383)..(1881482): a, c, g or t
  modified_base (1881531)..(1881569): a, c, g or t
  modified_base (1881587)..(1881588): a, c, g or t
  modified_base (1881615)..(1881617): a, c, g or t
  modified_base (1881650)..(1881693): a, c, g or t
  modified_base (1881695)..(1881700): a, c, g or t
  modified_base (1881755)..(1881800): a, c, g or t
  modified_base (1881811)..(1881811): a, c, g or t
  modified_base (1881823)..(1881823): a, c, g or t
  modified_base (1881832)..(1881852): a, c, g or t
  modified_base (1881862)..(1881862): a, c, g or t
  modified_base (1881903)..(1881908): a, c, g or t
  modified_base (1881916)..(1881916): a, c, g or t
  modified_base (1881937)..(1881939): a, c, g or t
  modified_base (1882020)..(1882023): a, c, g or t
  modified_base (1882047)..(1882050): a, c, g or t
  modified_base (1882141)..(1882161): a, c, g or t
  modified_base (1882267)..(1882320): a, c, g or t
  modified_base (1882326)..(1882327): a, c, g or t
  modified_base (1882331)..(1882334): a, c, g or t
  modified_base (1882336)..(1882339): a, c, g or t
  modified_base (1882341)..(1882342): a, c, g or t
  modified_base (1882344)..(1882393): a, c, g or t
  modified_base (1882418)..(1882467): a, c, g or t
  modified_base (1882522)..(1882524): a, c, g or t
  modified_base (1882548)..(1882548): a, c, g or t
  modified_base (1882558)..(1882578): a, c, g or t
  modified_base (1882585)..(1882588): a, c, g or t
  modified_base (1882602)..(1882624): a, c, g or t
  modified_base (1882649)..(1882652): a, c, g or t
  modified_base (1882654)..(1882654): a, c, g or t
  modified_base (1882692)..(1882692): a, c, g or t
  modified_base (1882698)..(1882698): a, c, g or t
  modified_base (1882740)..(1882740): a, c, g or t
  modified_base (1882764)..(1882764): a, c, g or t
  modified_base (1882768)..(1882831): a, c, g or t
  modified_base (1882834)..(1882834): a, c, g or t
  modified_base (1882877)..(1882882): a, c, g or t
  modified_base (1882885)..(1882886): a, c, g or t
  modified_base (1882944)..(1882985): a, c, g or t
  modified_base (1883032)..(1883077): a, c, g or t
  modified_base (1883108)..(1883108): a, c, g or t
  modified_base (1883110)..(1883160): a, c, g or t
  modified_base (1883203)..(1883204): a, c, g or t
  modified_base (1883230)..(1883265): a, c, g or t
  modified_base (1883332)..(1883359): a, c, g or t
  modified_base (1883383)..(1883448): a, c, g or t
  modified_base (1883450)..(1883451): a, c, g or t
  modified_base (1883455)..(1883456): a, c, g or t
  modified_base (1883475)..(1883475): a, c, g or t
  modified_base (1883509)..(1883512): a, c, g or t
  modified_base (1883526)..(1883527): a, c, g or t
  modified_base (1883533)..(1883601): a, c, g or t
  modified_base (1883619)..(1883619): a, c, g or t
  modified_base (1883622)..(1883622): a, c, g or t
  modified_base (1883624)..(1883668): a, c, g or t
  modified_base (1883694)..(1883717): a, c, g or t
  modified_base (1883720)..(1883721): a, c, g or t
  modified_base (1883733)..(1883734): a, c, g or t
  modified_base (1883741)..(1883742): a, c, g or t
  modified_base (1883758)..(1883825): a, c, g or t
  modified_base (1883859)..(1883860): a, c, g or t
  modified_base (1883871)..(1883888): a, c, g or t
  modified_base (1883922)..(1883923): a, c, g or t
  modified_base (1883929)..(1883971): a, c, g or t
  modified_base (1884060)..(1884061): a, c, g or t
  modified_base (1884067)..(1884118): a, c, g or t
  modified_base (1884150)..(1884254): a, c, g or t
  modified_base (1884301)..(1884302): a, c, g or t
  modified_base (1884312)..(1884313): a, c, g or t
  modified_base (1884338)..(1884342): a, c, g or t
  modified_base (1884448)..(1884510): a, c, g or t
  modified_base (1884512)..(1884513): a, c, g or t
  modified_base (1884530)..(1884545): a, c, g or t
  modified_base (1884549)..(1884551): a, c, g or t
  modified_base (1884645)..(1884754): a, c, g or t
  modified_base (1884756)..(1884756): a, c, g or t
  modified_base (1884776)..(1885045): a, c, g or t
  modified_base (1885049)..(1885050): a, c, g or t
  modified_base (1885072)..(1885084): a, c, g or t
  modified_base (1885124)..(1885174): a, c, g or t
  modified_base (1885197)..(1885213): a, c, g or t
  modified_base (1885235)..(1885236): a, c, g or t
  modified_base (1885238)..(1885242): a, c, g or t
  modified_base (1885256)..(1885257): a, c, g or t
  modified_base (1885261)..(1885262): a, c, g or t
  modified_base (1885266)..(1885328): a, c, g or t
  modified_base (1885358)..(1885461): a, c, g or t
  modified_base (1885485)..(1885504): a, c, g or t
  modified_base (1885543)..(1885544): a, c, g or t
  modified_base (1885547)..(1885548): a, c, g or t
  modified_base (1885560)..(1885609): a, c, g or t
  modified_base (1885634)..(1885677): a, c, g or t
  modified_base (1885842)..(1885843): a, c, g or t
  modified_base (1886801)..(1886803): a, c, g or t
  modified_base (1886806)..(1886807): a, c, g or t
  modified_base (1886827)..(1886830): a, c, g or t
  modified_base (1887490)..(1887491): a, c, g or t
  modified_base (1887690)..(1887691): a, c, g or t
  modified_base (1888862)..(1888863): a, c, g or t
  modified_base (1888869)..(1888875): a, c, g or t
  modified_base (1888877)..(1888878): a, c, g or t
  modified_base (1892916)..(1892916): a, c, g or t
  modified_base (1892987)..(1892988): a, c, g or t
  modified_base (1893061)..(1893067): a, c, g or t
  modified_base (1893966)..(1893966): a, c, g or t
  modified_base (1894832)..(1894833): a, c, g or t
  modified_base (1895610)..(1895610): a, c, g or t
  modified_base (1896471)..(1896472): a, c, g or t
  modified_base (1896474)..(1896475): a, c, g or t
  modified_base (1896745)..(1896746): a, c, g or t
  modified_base (1896815)..(1896816): a, c, g or t
  modified_base (1898355)..(1898355): a, c, g or t
  modified_base (1898419)..(1898420): a, c, g or t
  modified_base (1898479)..(1898510): a, c, g or t
  modified_base (1898514)..(1898514): a, c, g or t
  modified_base (1898523)..(1898523): a, c, g or t
  modified_base (1898578)..(1898578): a, c, g or t
  modified_base (1898713)..(1898713): a, c, g or t
  modified_base (1898747)..(1898747): a, c, g or t
  modified_base (1898772)..(1898813): a, c, g or t
  modified_base (1898817)..(1898817): a, c, g or t
  modified_base (1898870)..(1898915): a, c, g or t
  modified_base (1898940)..(1898943): a, c, g or t
  modified_base (1898962)..(1898963): a, c, g or t
  modified_base (1898965)..(1899004): a, c, g or t
  modified_base (1899140)..(1899141): a, c, g or t
  modified_base (1899145)..(1899200): a, c, g or t
  modified_base (1899458)..(1899500): a, c, g or t
  modified_base (1899560)..(1899562): a, c, g or t
  modified_base (1899564)..(1899606): a, c, g or t
  modified_base (1899651)..(1899705): a, c, g or t
  modified_base (1899737)..(1899737): a, c, g or t
  modified_base (1899740)..(1899740): a, c, g or t
  modified_base (1899746)..(1899746): a, c, g or t
  modified_base (1899748)..(1899788): a, c, g or t
  modified_base (1899790)..(1899791): a, c, g or t
  modified_base (1899813)..(1899853): a, c, g or t
  modified_base (1899855)..(1899856): a, c, g or t
  modified_base (1899894)..(1899898): a, c, g or t
  modified_base (1899901)..(1899956): a, c, g or t
  modified_base (1899980)..(1900019): a, c, g or t
  modified_base (1900046)..(1900091): a, c, g or t
  modified_base (1900146)..(1900146): a, c, g or t
  modified_base (1900154)..(1900156): a, c, g or t
  modified_base (1900162)..(1900162): a, c, g or t
  modified_base (1900197)..(1900197): a, c, g or t
  modified_base (1900223)..(1900223): a, c, g or t
  modified_base (1900288)..(1900297): a, c, g or t
  modified_base (1900347)..(1900350): a, c, g or t
  modified_base (1900420)..(1900462): a, c, g or t
  modified_base (1900569)..(1900569): a, c, g or t
  modified_base (1900620)..(1900621): a, c, g or t
  modified_base (1900686)..(1900687): a, c, g or t
  modified_base (1900691)..(1900691): a, c, g or t
  modified_base (1900695)..(1900696): a, c, g or t
  modified_base (1900707)..(1900707): a, c, g or t
  modified_base (1900759)..(1900760): a, c, g or t
  modified_base (1900762)..(1900805): a, c, g or t
  modified_base (1900807)..(1900808): a, c, g or t
  modified_base (1900836)..(1900837): a, c, g or t
  modified_base (1900891)..(1900891): a, c, g or t
  modified_base (1900893)..(1900947): a, c, g or t
  modified_base (1901012)..(1901057): a, c, g or t
  modified_base (1901090)..(1901156): a, c, g or t
  modified_base (1901216)..(1901259): a, c, g or t
  modified_base (1901267)..(1901268): a, c, g or t
  modified_base (1901276)..(1901277): a, c, g or t
  modified_base (1901301)..(1901346): a, c, g or t
  modified_base (1901350)..(1901351): a, c, g or t
  modified_base (1901357)..(1901358): a, c, g or t
  modified_base (1901388)..(1901388): a, c, g or t
  modified_base (1901475)..(1901478): a, c, g or t
  modified_base (1901481)..(1901527): a, c, g or t
  modified_base (1901546)..(1901583): a, c, g or t
  modified_base (1901604)..(1901655): a, c, g or t
  modified_base (1901683)..(1901690): a, c, g or t
  modified_base (1901698)..(1901698): a, c, g or t
  modified_base (1901714)..(1901731): a, c, g or t
  modified_base (1901771)..(1901772): a, c, g or t
  modified_base (1901776)..(1901776): a, c, g or t
  modified_base (1901783)..(1901825): a, c, g or t
  modified_base (1901846)..(1901861): a, c, g or t
  modified_base (1901892)..(1901950): a, c, g or t
  modified_base (1901986)..(1901987): a, c, g or t
  modified_base (1901989)..(1901990): a, c, g or t
  modified_base (1901994)..(1901995): a, c, g or t
  modified_base (1901997)..(1902011): a, c, g or t
  modified_base (1902042)..(1902043): a, c, g or t
  modified_base (1902059)..(1902060): a, c, g or t
  modified_base (1902064)..(1902086): a, c, g or t
  modified_base (1902109)..(1902114): a, c, g or t
  modified_base (1902139)..(1902152): a, c, g or t
  modified_base (1902186)..(1902186): a, c, g or t
  modified_base (1902189)..(1902192): a, c, g or t
  modified_base (1902226)..(1902227): a, c, g or t
  modified_base (1902267)..(1902270): a, c, g or t
  modified_base (1902274)..(1902276): a, c, g or t
  modified_base (1902299)..(1902338): a, c, g or t
  modified_base (1902363)..(1902363): a, c, g or t
  modified_base (1902372)..(1902382): a, c, g or t
  modified_base (1902423)..(1902485): a, c, g or t
  modified_base (1902639)..(1902727): a, c, g or t
  modified_base (1902729)..(1902732): a, c, g or t
  modified_base (1902752)..(1902752): a, c, g or t
  modified_base (1902758)..(1903198): a, c, g or t
  modified_base (1903206)..(1903206): a, c, g or t
  modified_base (1903216)..(1903217): a, c, g or t
  modified_base (1903222)..(1903238): a, c, g or t
  modified_base (1903249)..(1903249): a, c, g or t
  modified_base (1903275)..(1903342): a, c, g or t
  modified_base (1903376)..(1903382): a, c, g or t
  modified_base (1903413)..(1903425): a, c, g or t
  modified_base (1903436)..(1903437): a, c, g or t
  modified_base (1903469)..(1903470): a, c, g or t
  modified_base (1903474)..(1903477): a, c, g or t
  modified_base (1903501)..(1903545): a, c, g or t
  modified_base (1903558)..(1903559): a, c, g or t
  modified_base (1903563)..(1903564): a, c, g or t
  modified_base (1903569)..(1903587): a, c, g or t
  modified_base (1903617)..(1903618): a, c, g or t
  modified_base (1903622)..(1903694): a, c, g or t
  modified_base (1903703)..(1903703): a, c, g or t
  modified_base (1903723)..(1903929): a, c, g or t
  modified_base (1903967)..(1904008): a, c, g or t
  modified_base (1904029)..(1904066): a, c, g or t
  modified_base (1904103)..(1904106): a, c, g or t
  modified_base (1904112)..(1904128): a, c, g or t
  modified_base (1904131)..(1904133): a, c, g or t
  modified_base (1904138)..(1904139): a, c, g or t
  modified_base (1904152)..(1904194): a, c, g or t
  modified_base (1904234)..(1904238): a, c, g or t
  modified_base (1904257)..(1904257): a, c, g or t
  modified_base (1904259)..(1905326): a, c, g or t
  modified_base (1905360)..(1905950): a, c, g or t
  modified_base (1905965)..(1905965): a, c, g or t
  modified_base (1905969)..(1905971): a, c, g or t
  modified_base (1905974)..(1906386): a, c, g or t
  modified_base (1906389)..(1906390): a, c, g or t
  modified_base (1906410)..(1906625): a, c, g or t
  modified_base (1906648)..(1906687): a, c, g or t
  modified_base (1906689)..(1906690): a, c, g or t
  modified_base (1906714)..(1906755): a, c, g or t
  modified_base (1906841)..(1906938): a, c, g or t
  modified_base (1906976)..(1907024): a, c, g or t
  modified_base (1907966)..(1907966): a, c, g or t
  modified_base (1907968)..(1907969): a, c, g or t
  modified_base (1908152)..(1908156): a, c, g or t
  modified_base (1908288)..(1908556): a, c, g or t
  modified_base (1908583)..(1908638): a, c, g or t
  modified_base (1908709)..(1908722): a, c, g or t
  modified_base (1908772)..(1908773): a, c, g or t
  modified_base (1908847)..(1908893): a, c, g or t
  modified_base (1910200)..(1910200): a, c, g or t
  modified_base (1910202)..(1910203): a, c, g or t
  modified_base (1910207)..(1910207): a, c, g or t
  modified_base (1910435)..(1910436): a, c, g or t
  modified_base (1910440)..(1910441): a, c, g or t
  modified_base (1910443)..(1910448): a, c, g or t
  modified_base (1910519)..(1910519): a, c, g or t
  modified_base (1910653)..(1910653): a, c, g or t
  modified_base (1910870)..(1910870): a, c, g or t
  modified_base (1910877)..(1910878): a, c, g or t
  modified_base (1911157)..(1911157): a, c, g or t
  modified_base (1911212)..(1911212): a, c, g or t
  modified_base (1911219)..(1911219): a, c, g or t
  modified_base (1911426)..(1911478): a, c, g or t
  modified_base (1911540)..(1911542): a, c, g or t
  modified_base (1911547)..(1911579): a, c, g or t
  modified_base (1911582)..(1911583): a, c, g or t
  modified_base (1911635)..(1911651): a, c, g or t
  modified_base (1911657)..(1911657): a, c, g or t
  modified_base (1911677)..(1911678): a, c, g or t
  modified_base (1911682)..(1911691): a, c, g or t
  modified_base (1911711)..(1911711): a, c, g or t
  modified_base (1911796)..(1911796): a, c, g or t
  modified_base (1911798)..(1911835): a, c, g or t
  modified_base (1911864)..(1911864): a, c, g or t
  modified_base (1911874)..(1911913): a, c, g or t
  modified_base (1912005)..(1912005): a, c, g or t
  modified_base (1912023)..(1912023): a, c, g or t
  modified_base (1912032)..(1912050): a, c, g or t
  modified_base (1912065)..(1912065): a, c, g or t
  modified_base (1912316)..(1912355): a, c, g or t
  modified_base (1912581)..(1912633): a, c, g or t
  modified_base (1912658)..(1912666): a, c, g or t
  modified_base (1912713)..(1912713): a, c, g or t
  modified_base (1912965)..(1912972): a, c, g or t
  modified_base (1912981)..(1912982): a, c, g or t
  modified_base (1912984)..(1912985): a, c, g or t
  modified_base (1913019)..(1913153): a, c, g or t
  modified_base (1913205)..(1913208): a, c, g or t
  modified_base (1913211)..(1913216): a, c, g or t
  modified_base (1913224)..(1913224): a, c, g or t
  modified_base (1913233)..(1913233): a, c, g or t
  modified_base (1913240)..(1913335): a, c, g or t
  modified_base (1913381)..(1913381): a, c, g or t
  modified_base (1913384)..(1913384): a, c, g or t
  modified_base (1913402)..(1913402): a, c, g or t
  modified_base (1913408)..(1913408): a, c, g or t
  modified_base (1913413)..(1913416): a, c, g or t
  modified_base (1913643)..(1913651): a, c, g or t
  modified_base (1913712)..(1913714): a, c, g or t
  modified_base (1913729)..(1913732): a, c, g or t
  modified_base (1913752)..(1913754): a, c, g or t
  modified_base (1913760)..(1913824): a, c, g or t
  modified_base (1913826)..(1913827): a, c, g or t
  modified_base (1913831)..(1913832): a, c, g or t
  modified_base (1913836)..(1913837): a, c, g or t
  modified_base (1913848)..(1914118): a, c, g or t
  modified_base (1914147)..(1914148): a, c, g or t
  modified_base (1914150)..(1914150): a, c, g or t
  modified_base (1914155)..(1914212): a, c, g or t
  modified_base (1914216)..(1914217): a, c, g or t
  modified_base (1914262)..(1914306): a, c, g or t
  modified_base (1914370)..(1914412): a, c, g or t
  modified_base (1914549)..(1914580): a, c, g or t
  modified_base (1914582)..(1914588): a, c, g or t
  modified_base (1914685)..(1914724): a, c, g or t
  modified_base (1914765)..(1914808): a, c, g or t
  modified_base (1914905)..(1914955): a, c, g or t
  modified_base (1915027)..(1915027): a, c, g or t
  modified_base (1915044)..(1915097): a, c, g or t
  modified_base (1915122)..(1915122): a, c, g or t
  modified_base (1915131)..(1915193): a, c, g or t
  modified_base (1915249)..(1915249): a, c, g or t
  modified_base (1915257)..(1915257): a, c, g or t
  modified_base (1915271)..(1915272): a, c, g or t
  modified_base (1915274)..(1915275): a, c, g or t
  modified_base (1915314)..(1915314): a, c, g or t
  modified_base (1915326)..(1915326): a, c, g or t
  modified_base (1915336)..(1915395): a, c, g or t
  modified_base (1915571)..(1915610): a, c, g or t
  modified_base (1915668)..(1915671): a, c, g or t
  modified_base (1916391)..(1916393): a, c, g or t
  modified_base (1916741)..(1916744): a, c, g or t
  modified_base (1916800)..(1916803): a, c, g or t
  modified_base (1916807)..(1916812): a, c, g or t
  modified_base (1918374)..(1918396): a, c, g or t
  modified_base (1919970)..(1919970): a, c, g or t
  modified_base (1922079)..(1922079): a, c, g or t
  modified_base (1922773)..(1922773): a, c, g or t
  modified_base (1923278)..(1923278): a, c, g or t
  modified_base (1923294)..(1923294): a, c, g or t
  modified_base (1923688)..(1923691): a, c, g or t
  modified_base (1923693)..(1923693): a, c, g or t
  modified_base (1925034)..(1925034): a, c, g or t
  modified_base (1925158)..(1925158): a, c, g or t
  modified_base (1925509)..(1925509): a, c, g or t
  modified_base (1925519)..(1925519): a, c, g or t
  modified_base (1926135)..(1926135): a, c, g or t
  modified_base (1930797)..(1930797): a, c, g or t
  modified_base (1932065)..(1932065): a, c, g or t
  modified_base (1932069)..(1932069): a, c, g or t
  modified_base (1933146)..(1933146): a, c, g or t
  modified_base (1933894)..(1933897): a, c, g or t
  modified_base (1934142)..(1934142): a, c, g or t
  modified_base (1934929)..(1934929): a, c, g or t
  modified_base (1939745)..(1939745): a, c, g or t
  modified_base (1940003)..(1940003): a, c, g or t
  modified_base (1944609)..(1944612): a, c, g or t
  modified_base (1945791)..(1945791): a, c, g or t
  modified_base (1948308)..(1948308): a, c, g or t
  modified_base (1949533)..(1949542): a, c, g or t
  modified_base (1955568)..(1955571): a, c, g or t
  modified_base (1955740)..(1955740): a, c, g or t
  modified_base (1957359)..(1957360): a, c, g or t
  modified_base (1957781)..(1957781): a, c, g or t
  modified_base (1959244)..(1959244): a, c, g or t
  modified_base (1959979)..(1959979): a, c, g or t
  modified_base (1960483)..(1960483): a, c, g or t
  modified_base (1962389)..(1962393): a, c, g or t
  modified_base (1964609)..(1964620): a, c, g or t
  modified_base (1965941)..(1965949): a, c, g or t
  modified_base (1966522)..(1966522): a, c, g or t
  modified_base (1966535)..(1966535): a, c, g or t
  modified_base (1966575)..(1966575): a, c, g or t
  modified_base (1967687)..(1967687): a, c, g or t
  modified_base (1968902)..(1968902): a, c, g or t
  modified_base (1968982)..(1968983): a, c, g or t
  modified_base (1968988)..(1969035): a, c, g or t
  modified_base (1969044)..(1969045): a, c, g or t
  modified_base (1969061)..(1969061): a, c, g or t
  modified_base (1971407)..(1971415): a, c, g or t
  modified_base (1972009)..(1972009): a, c, g or t
  modified_base (1976023)..(1976023): a, c, g or t
  modified_base (1976368)..(1976368): a, c, g or t
  modified_base (1977460)..(1977463): a, c, g or t
  modified_base (1979314)..(1979314): a, c, g or t
  modified_base (1980140)..(1980140): a, c, g or t
  modified_base (1981161)..(1981161): a, c, g or t
  modified_base (1981167)..(1981167): a, c, g or t
  modified_base (1981171)..(1981172): a, c, g or t
  modified_base (1983043)..(1983050): a, c, g or t
  modified_base (1986727)..(1986727): a, c, g or t
  modified_base (1986911)..(1986911): a, c, g or t
  modified_base (1988760)..(1988765): a, c, g or t
  modified_base (1989803)..(1989806): a, c, g or t
  modified_base (1990709)..(1990712): a, c, g or t
  modified_base (1991331)..(1991336): a, c, g or t
  modified_base (1991518)..(1991518): a, c, g or t
  modified_base (1991650)..(1991665): a, c, g or t
  modified_base (1999423)..(1999423): a, c, g or t
  modified_base (2000437)..(2000437): a, c, g or t
  modified_base (2002908)..(2002908): a, c, g or t
  modified_base (2003541)..(2003552): a, c, g or t
  modified_base (2004758)..(2004758): a, c, g or t
  modified_base (2009811)..(2009811): a, c, g or t
  modified_base (2010088)..(2010088): a, c, g or t
  modified_base (2013727)..(2013728): a, c, g or t
  modified_base (2013730)..(2013737): a, c, g or t
  modified_base (2014997)..(2015005): a, c, g or t
  modified_base (2015013)..(2015014): a, c, g or t
  modified_base (2018574)..(2018574): a, c, g or t
  modified_base (2018659)..(2018659): a, c, g or t
  modified_base (2018867)..(2018867): a, c, g or t
  modified_base (2023451)..(2023451): a, c, g or t
  modified_base (2024979)..(2024979): a, c, g or t
  modified_base (2026344)..(2026344): a, c, g or t
  modified_base (2026715)..(2026718): a, c, g or t
  modified_base (2029903)..(2029903): a, c, g or t
  modified_base (2029905)..(2029905): a, c, g or t
  modified_base (2029907)..(2029910): a, c, g or t
  modified_base (2032385)..(2032388): a, c, g or t
  modified_base (2035316)..(2035316): a, c, g or t
  modified_base (2037024)..(2037024): a, c, g or t
  modified_base (2038331)..(2038331): a, c, g or t
  modified_base (2038434)..(2038437): a, c, g or t
  modified_base (2038920)..(2038928): a, c, g or t
  modified_base (2039676)..(2039677): a, c, g or t
  modified_base (2039684)..(2039684): a, c, g or t
  modified_base (2044254)..(2044254): a, c, g or t
  modified_base (2046544)..(2046544): a, c, g or t
  modified_base (2048030)..(2048030): a, c, g or t
  modified_base (2048032)..(2048033): a, c, g or t
  modified_base (2051293)..(2051293): a, c, g or t
  modified_base (2052035)..(2052035): a, c, g or t
  modified_base (2055437)..(2055437): a, c, g or t
  modified_base (2055458)..(2055458): a, c, g or t
  modified_base (2055831)..(2055831): a, c, g or t
  modified_base (2059352)..(2059352): a, c, g or t
  modified_base (2059907)..(2059907): a, c, g or t
  modified_base (2059910)..(2059910): a, c, g or t
  modified_base (2060096)..(2060096): a, c, g or t
  modified_base (2062080)..(2062084): a, c, g or t
  modified_base (2063403)..(2063403): a, c, g or t
  modified_base (2063973)..(2063973): a, c, g or t
  modified_base (2064779)..(2064779): a, c, g or t
  modified_base (2066138)..(2066138): a, c, g or t
  modified_base (2066468)..(2066476): a, c, g or t
  modified_base (2066478)..(2066478): a, c, g or t
  modified_base (2067699)..(2067699): a, c, g or t
  modified_base (2067719)..(2067719): a, c, g or t
  modified_base (2068557)..(2068557): a, c, g or t
  modified_base (2068560)..(2068560): a, c, g or t
  modified_base (2069151)..(2069151): a, c, g or t
  modified_base (2071494)..(2071494): a, c, g or t
  modified_base (2073284)..(2073284): a, c, g or t
  modified_base (2073355)..(2073358): a, c, g or t
  modified_base (2075930)..(2075930): a, c, g or t
  modified_base (2076369)..(2076369): a, c, g or t
  modified_base (2081054)..(2081054): a, c, g or t
  modified_base (2081251)..(2081251): a, c, g or t
  modified_base (2082102)..(2082102): a, c, g or t
  modified_base (2083340)..(2083341): a, c, g or t
  modified_base (2084084)..(2084084): a, c, g or t
  modified_base (2084149)..(2084149): a, c, g or t
  modified_base (2084342)..(2084342): a, c, g or t
  modified_base (2084606)..(2084606): a, c, g or t
  modified_base (2086932)..(2086932): a, c, g or t
  modified_base (2086942)..(2086942): a, c, g or t
  modified_base (2087806)..(2087811): a, c, g or t
  modified_base (2088359)..(2088359): a, c, g or t
  modified_base (2089458)..(2089458): a, c, g or t
  modified_base (2089587)..(2089587): a, c, g or t
  modified_base (2090696)..(2090700): a, c, g or t
  modified_base (2090742)..(2090742): a, c, g or t
  modified_base (2091649)..(2091649): a, c, g or t
  modified_base (2094334)..(2094334): a, c, g or t
  modified_base (2095507)..(2095507): a, c, g or t
  modified_base (2095578)..(2095578): a, c, g or t
  modified_base (2096591)..(2096591): a, c, g or t
  modified_base (2096709)..(2096712): a, c, g or t
  modified_base (2096890)..(2096891): a, c, g or t
  modified_base (2096893)..(2096903): a, c, g or t
  modified_base (2096908)..(2096908): a, c, g or t
  modified_base (2097012)..(2097012): a, c, g or t
  modified_base (2101172)..(2101172): a, c, g or t
  modified_base (2103737)..(2103737): a, c, g or t
  modified_base (2104737)..(2104737): a, c, g or t
  modified_base (2105664)..(2105664): a, c, g or t
  modified_base (2108892)..(2108892): a, c, g or t
  modified_base (2110162)..(2110162): a, c, g or t
  modified_base (2110602)..(2110602): a, c, g or t
  modified_base (2112134)..(2112134): a, c, g or t
  modified_base (2112164)..(2112164): a, c, g or t
  modified_base (2112214)..(2112214): a, c, g or t
  modified_base (2114321)..(2114326): a, c, g or t
  modified_base (2114362)..(2114362): a, c, g or t
  modified_base (2114702)..(2114703): a, c, g or t
  modified_base (2114706)..(2114712): a, c, g or t
  modified_base (2114811)..(2114812): a, c, g or t
  modified_base (2114823)..(2114954): a, c, g or t
  modified_base (2114959)..(2114959): a, c, g or t
  modified_base (2114996)..(2114997): a, c, g or t
  modified_base (2115027)..(2115028): a, c, g or t
  modified_base (2115061)..(2115096): a, c, g or t
  modified_base (2115098)..(2115099): a, c, g or t
  modified_base (2115712)..(2115717): a, c, g or t
  modified_base (2119382)..(2119382): a, c, g or t
  modified_base (2119846)..(2119846): a, c, g or t
  modified_base (2120341)..(2120342): a, c, g or t
  modified_base (2120347)..(2120352): a, c, g or t
  modified_base (2120354)..(2120355): a, c, g or t
  modified_base (2120736)..(2120740): a, c, g or t
  modified_base (2120899)..(2120900): a, c, g or t
  modified_base (2121777)..(2121777): a, c, g or t
  modified_base (2121964)..(2121967): a, c, g or t
  modified_base (2123638)..(2123643): a, c, g or t
  modified_base (2124069)..(2124069): a, c, g or t
  modified_base (2124123)..(2124123): a, c, g or t
  modified_base (2124336)..(2124336): a, c, g or t
  modified_base (2129186)..(2129186): a, c, g or t
  modified_base (2129786)..(2129789): a, c, g or t
  modified_base (2130807)..(2130807): a, c, g or t
  modified_base (2131544)..(2131549): a, c, g or t
  modified_base (2132117)..(2132117): a, c, g or t
  modified_base (2132147)..(2132147): a, c, g or t
  modified_base (2134318)..(2134320): a, c, g or t
  modified_base (2134553)..(2134560): a, c, g or t
  modified_base (2135962)..(2135962): a, c, g or t
  modified_base (2135995)..(2135995): a, c, g or t
  modified_base (2136511)..(2136524): a, c, g or t
  modified_base (2136527)..(2136527): a, c, g or t
  modified_base (2140633)..(2140633): a, c, g or t
  modified_base (2140690)..(2140690): a, c, g or t
  modified_base (2140693)..(2140693): a, c, g or t
  modified_base (2140943)..(2140943): a, c, g or t
  modified_base (2140977)..(2140977): a, c, g or t
  modified_base (2141554)..(2141558): a, c, g or t
  modified_base (2143325)..(2143325): a, c, g or t
  modified_base (2143601)..(2143601): a, c, g or t
  modified_base (2144414)..(2144414): a, c, g or t
  modified_base (2147332)..(2147337): a, c, g or t
  modified_base (2147339)..(2147341): a, c, g or t
  modified_base (2147976)..(2147980): a, c, g or t
  modified_base (2148303)..(2148303): a, c, g or t
  modified_base (2148477)..(2148477): a, c, g or t
  modified_base (2149841)..(2149841): a, c, g or t
  modified_base (2151535)..(2151535): a, c, g or t
  modified_base (2151589)..(2151592): a, c, g or t
  modified_base (2154321)..(2154321): a, c, g or t
  modified_base (2156144)..(2156144): a, c, g or t
  modified_base (2156147)..(2156156): a, c, g or t
  modified_base (2156160)..(2156160): a, c, g or t
  modified_base (2156163)..(2156163): a, c, g or t
  modified_base (2156562)..(2156562): a, c, g or t
  modified_base (2157923)..(2157923): a, c, g or t
  modified_base (2158164)..(2158164): a, c, g or t
  modified_base (2159069)..(2159069): a, c, g or t
  modified_base (2161121)..(2161121): a, c, g or t
  modified_base (2161179)..(2161179): a, c, g or t
  modified_base (2162418)..(2162421): a, c, g or t
  modified_base (2162454)..(2162454): a, c, g or t
  modified_base (2162525)..(2162528): a, c, g or t
  modified_base (2162531)..(2162531): a, c, g or t
  modified_base (2162534)..(2162544): a, c, g or t
  modified_base (2162854)..(2162854): a, c, g or t
  modified_base (2162933)..(2162933): a, c, g or t
  modified_base (2165297)..(2165297): a, c, g or t
  modified_base (2166706)..(2166706): a, c, g or t
  modified_base (2167524)..(2167524): a, c, g or t
  modified_base (2167580)..(2167580): a, c, g or t
  modified_base (2168833)..(2168833): a, c, g or t
  modified_base (2170269)..(2170269): a, c, g or t
  modified_base (2170643)..(2170643): a, c, g or t
  modified_base (2170649)..(2170649): a, c, g or t
  modified_base (2171637)..(2171637): a, c, g or t
  modified_base (2172230)..(2172230): a, c, g or t
  modified_base (2175366)..(2175367): a, c, g or t
  modified_base (2175370)..(2175371): a, c, g or t
  modified_base (2176248)..(2176248): a, c, g or t
  modified_base (2176611)..(2176615): a, c, g or t
  modified_base (2176753)..(2176753): a, c, g or t
  modified_base (2176926)..(2176926): a, c, g or t
  modified_base (2177955)..(2177955): a, c, g or t
  modified_base (2178735)..(2178735): a, c, g or t
  modified_base (2180395)..(2180395): a, c, g or t
  modified_base (2180650)..(2180653): a, c, g or t
  modified_base (2184448)..(2184448): a, c, g or t
  modified_base (2184985)..(2184985): a, c, g or t
  modified_base (2185924)..(2185929): a, c, g or t
  modified_base (2185964)..(2185964): a, c, g or t
  modified_base (2185995)..(2185995): a, c, g or t
  modified_base (2186028)..(2186028): a, c, g or t
  modified_base (2186031)..(2186031): a, c, g or t
  modified_base (2186039)..(2186039): a, c, g or t
  modified_base (2186095)..(2186095): a, c, g or t
  modified_base (2188556)..(2188556): a, c, g or t
  modified_base (2189102)..(2189102): a, c, g or t
  modified_base (2190201)..(2190201): a, c, g or t
  modified_base (2190461)..(2190461): a, c, g or t
  modified_base (2190528)..(2190528): a, c, g or t
  modified_base (2190559)..(2190559): a, c, g or t
  modified_base (2190865)..(2190865): a, c, g or t
  modified_base (2190884)..(2190884): a, c, g or t
  modified_base (2193277)..(2193277): a, c, g or t
  modified_base (2193324)..(2193324): a, c, g or t
  modified_base (2193369)..(2193369): a, c, g or t
  modified_base (2193412)..(2193412): a, c, g or t
  modified_base (2195749)..(2195749): a, c, g or t
  modified_base (2196857)..(2196862): a, c, g or t
  modified_base (2199014)..(2199014): a, c, g or t
  modified_base (2200903)..(2200903): a, c, g or t
  modified_base (2203490)..(2203490): a, c, g or t
  modified_base (2204742)..(2204743): a, c, g or t
  modified_base (2204746)..(2204755): a, c, g or t
  modified_base (2206807)..(2206812): a, c, g or t
  modified_base (2209392)..(2209392): a, c, g or t
  modified_base (2210768)..(2210768): a, c, g or t
  modified_base (2210983)..(2210986): a, c, g or t
  modified_base (2211374)..(2211374): a, c, g or t
  modified_base (2212180)..(2212180): a, c, g or t
  modified_base (2212324)..(2212324): a, c, g or t
  modified_base (2215006)..(2215009): a, c, g or t
  modified_base (2215016)..(2215016): a, c, g or t
  modified_base (2215072)..(2215077): a, c, g or t
  modified_base (2215087)..(2215087): a, c, g or t
  modified_base (2215545)..(2215545): a, c, g or t
  modified_base (2216652)..(2216652): a, c, g or t
  modified_base (2218962)..(2219000): a, c, g or t
  modified_base (2219002)..(2219002): a, c, g or t
  modified_base (2219023)..(2219027): a, c, g or t
  modified_base (2220740)..(2220748): a, c, g or t
  modified_base (2221594)..(2221594): a, c, g or t
  modified_base (2221826)..(2221829): a, c, g or t
  modified_base (2222192)..(2222192): a, c, g or t
  modified_base (2224885)..(2224885): a, c, g or t
  modified_base (2224888)..(2224893): a, c, g or t
  modified_base (2224898)..(2224899): a, c, g or t
  modified_base (2225896)..(2225896): a, c, g or t
  modified_base (2226475)..(2226475): a, c, g or t
  modified_base (2226527)..(2226527): a, c, g or t
  modified_base (2226902)..(2226902): a, c, g or t
  modified_base (2227975)..(2227975): a, c, g or t
  modified_base (2229073)..(2229073): a, c, g or t
  modified_base (2230791)..(2230794): a, c, g or t
  modified_base (2230796)..(2230796): a, c, g or t
  modified_base (2232274)..(2232274): a, c, g or t
  modified_base (2233491)..(2233491): a, c, g or t
  modified_base (2233493)..(2233493): a, c, g or t
  modified_base (2234294)..(2234294): a, c, g or t
  modified_base (2236848)..(2236848): a, c, g or t
  modified_base (2237825)..(2237825): a, c, g or t
  modified_base (2240303)..(2240303): a, c, g or t
  modified_base (2241256)..(2241256): a, c, g or t
  modified_base (2243119)..(2243119): a, c, g or t
  modified_base (2245078)..(2245078): a, c, g or t
  modified_base (2245098)..(2245098): a, c, g or t
  modified_base (2245236)..(2245237): a, c, g or t
  modified_base (2245239)..(2245247): a, c, g or t
  modified_base (2245996)..(2245999): a, c, g or t
  modified_base (2248493)..(2248496): a, c, g or t
  modified_base (2249987)..(2249987): a, c, g or t
  modified_base (2254511)..(2254517): a, c, g or t
  modified_base (2255966)..(2255966): a, c, g or t
  modified_base (2256338)..(2256341): a, c, g or t
  modified_base (2256745)..(2256751): a, c, g or t
  modified_base (2258175)..(2258175): a, c, g or t
  modified_base (2259270)..(2259270): a, c, g or t
  modified_base (2261843)..(2261843): a, c, g or t
  modified_base (2261848)..(2261858): a, c, g or t
  modified_base (2262697)..(2262697): a, c, g or t
  modified_base (2262705)..(2262705): a, c, g or t
  modified_base (2265397)..(2265397): a, c, g or t
  modified_base (2265560)..(2265560): a, c, g or t
  modified_base (2265732)..(2265733): a, c, g or t
  modified_base (2265739)..(2265743): a, c, g or t
  modified_base (2267160)..(2267160): a, c, g or t
  modified_base (2267207)..(2267207): a, c, g or t
  modified_base (2267224)..(2267224): a, c, g or t
  modified_base (2267238)..(2267238): a, c, g or t
  modified_base (2267249)..(2267249): a, c, g or t
  modified_base (2268168)..(2268168): a, c, g or t
  modified_base (2268646)..(2268646): a, c, g or t
  modified_base (2268741)..(2268741): a, c, g or t
  modified_base (2270937)..(2270937): a, c, g or t
  modified_base (2271317)..(2271317): a, c, g or t
  modified_base (2271865)..(2271865): a, c, g or t
  modified_base (2271892)..(2271892): a, c, g or t
  modified_base (2271906)..(2271906): a, c, g or t
  modified_base (2271952)..(2271952): a, c, g or t
  modified_base (2272263)..(2272263): a, c, g or t
  modified_base (2272480)..(2272481): a, c, g or t
  modified_base (2272484)..(2272487): a, c, g or t
  modified_base (2272836)..(2272836): a, c, g or t
  modified_base (2272974)..(2272974): a, c, g or t
  modified_base (2273263)..(2273263): a, c, g or t
  modified_base (2273624)..(2273627): a, c, g or t
  modified_base (2277161)..(2277161): a, c, g or t
  modified_base (2278605)..(2278628): a, c, g or t
  modified_base (2278646)..(2278648): a, c, g or t
  modified_base (2278650)..(2278651): a, c, g or t
  modified_base (2278654)..(2278654): a, c, g or t
  modified_base (2278815)..(2278815): a, c, g or t
  modified_base (2279832)..(2279832): a, c, g or t
  modified_base (2279834)..(2279837): a, c, g or t
  modified_base (2280878)..(2280878): a, c, g or t
  modified_base (2280986)..(2280986): a, c, g or t
  modified_base (2281557)..(2281557): a, c, g or t
  modified_base (2282449)..(2282449): a, c, g or t
  modified_base (2282536)..(2282536): a, c, g or t
  modified_base (2283027)..(2283027): a, c, g or t
  modified_base (2284291)..(2284292): a, c, g or t
  modified_base (2284294)..(2284305): a, c, g or t
  modified_base (2285953)..(2285953): a, c, g or t
  modified_base (2287001)..(2287003): a, c, g or t
  modified_base (2287446)..(2287449): a, c, g or t
  modified_base (2287452)..(2287455): a, c, g or t
  modified_base (2288743)..(2288743): a, c, g or t
  modified_base (2288862)..(2288862): a, c, g or t
  modified_base (2288933)..(2288933): a, c, g or t
  modified_base (2290227)..(2290233): a, c, g or t
  modified_base (2290907)..(2290907): a, c, g or t
  modified_base (2290917)..(2290917): a, c, g or t
  modified_base (2290954)..(2290954): a, c, g or t
  modified_base (2291144)..(2291144): a, c, g or t
  modified_base (2291959)..(2291962): a, c, g or t
  modified_base (2292442)..(2292442): a, c, g or t
  modified_base (2293207)..(2293210): a, c, g or t
  modified_base (2295856)..(2295861): a, c, g or t
  modified_base (2295867)..(2295868): a, c, g or t
  modified_base (2295966)..(2295969): a, c, g or t
  modified_base (2295993)..(2296024): a, c, g or t
  modified_base (2296041)..(2296042): a, c, g or t
  modified_base (2296044)..(2296045): a, c, g or t
  modified_base (2296051)..(2296051): a, c, g or t
  modified_base (2296054)..(2296068): a, c, g or t
  modified_base (2296772)..(2296775): a, c, g or t
  modified_base (2297102)..(2297102): a, c, g or t
  modified_base (2297706)..(2297706): a, c, g or t
  modified_base (2297885)..(2297885): a, c, g or t
  modified_base (2298769)..(2298769): a, c, g or t
  modified_base (2299225)..(2299229): a, c, g or t
  modified_base (2300238)..(2300238): a, c, g or t
  modified_base (2301867)..(2301867): a, c, g or t
  modified_base (2303275)..(2303275): a, c, g or t
  modified_base (2305692)..(2305692): a, c, g or t
  modified_base (2306144)..(2306145): a, c, g or t
  modified_base (2306404)..(2306416): a, c, g or t
  modified_base (2306929)..(2306929): a, c, g or t
  modified_base (2307052)..(2307052): a, c, g or t
  modified_base (2307174)..(2307175): a, c, g or t
  modified_base (2307177)..(2307178): a, c, g or t
  modified_base (2307412)..(2307412): a, c, g or t
  modified_base (2307452)..(2307457): a, c, g or t
  modified_base (2307459)..(2307460): a, c, g or t
  modified_base (2307536)..(2307537): a, c, g or t
  modified_base (2307543)..(2307546): a, c, g or t
  modified_base (2307548)..(2307602): a, c, g or t
  modified_base (2307608)..(2307609): a, c, g or t
  modified_base (2307613)..(2307614): a, c, g or t
  modified_base (2307618)..(2307619): a, c, g or t
  modified_base (2307623)..(2307680): a, c, g or t
  modified_base (2307686)..(2307687): a, c, g or t
  modified_base (2307700)..(2307759): a, c, g or t
  modified_base (2307765)..(2307766): a, c, g or t
  modified_base (2307798)..(2307798): a, c, g or t
  modified_base (2307821)..(2307821): a, c, g or t
  modified_base (2307823)..(2307824): a, c, g or t
  modified_base (2307834)..(2307835): a, c, g or t
  modified_base (2307839)..(2307840): a, c, g or t
  modified_base (2307844)..(2307845): a, c, g or t
  modified_base (2307849)..(2307855): a, c, g or t
  modified_base (2307866)..(2307867): a, c, g or t
  modified_base (2307871)..(2307872): a, c, g or t
  modified_base (2307878)..(2307926): a, c, g or t
  modified_base (2307928)..(2307929): a, c, g or t
  modified_base (2307951)..(2308002): a, c, g or t
  modified_base (2308004)..(2308005): a, c, g or t
  modified_base (2308058)..(2308101): a, c, g or t
  modified_base (2308103)..(2308107): a, c, g or t
  modified_base (2308111)..(2308112): a, c, g or t
  modified_base (2308291)..(2308336): a, c, g or t
  modified_base (2308415)..(2308415): a, c, g or t
  modified_base (2308467)..(2308467): a, c, g or t
  modified_base (2308473)..(2308473): a, c, g or t
  modified_base (2308522)..(2308522): a, c, g or t
  modified_base (2308535)..(2308535): a, c, g or t
  modified_base (2308547)..(2308547): a, c, g or t
  modified_base (2308565)..(2308565): a, c, g or t
  modified_base (2308569)..(2308569): a, c, g or t
  modified_base (2308586)..(2308586): a, c, g or t
  modified_base (2308595)..(2308595): a, c, g or t
  modified_base (2308645)..(2308645): a, c, g or t
  modified_base (2308705)..(2308705): a, c, g or t
  modified_base (2308732)..(2308732): a, c, g or t
  modified_base (2308871)..(2308908): a, c, g or t
  modified_base (2308965)..(2308965): a, c, g or t
  modified_base (2308968)..(2308970): a, c, g or t
  modified_base (2308972)..(2308976): a, c, g or t
  modified_base (2309022)..(2309062): a, c, g or t
  modified_base (2309166)..(2309173): a, c, g or t
  modified_base (2309175)..(2309182): a, c, g or t
  modified_base (2309199)..(2309199): a, c, g or t
  modified_base (2309353)..(2309353): a, c, g or t
  modified_base (2309361)..(2309361): a, c, g or t
  modified_base (2309400)..(2309401): a, c, g or t
  modified_base (2309403)..(2309408): a, c, g or t
  modified_base (2309410)..(2309411): a, c, g or t
  modified_base (2309416)..(2309416): a, c, g or t
  modified_base (2309614)..(2309620): a, c, g or t
  modified_base (2309649)..(2309649): a, c, g or t
  modified_base (2309652)..(2309704): a, c, g or t
  modified_base (2309890)..(2309895): a, c, g or t
  modified_base (2309899)..(2309899): a, c, g or t
  modified_base (2309924)..(2309924): a, c, g or t
  modified_base (2309993)..(2310034): a, c, g or t
  modified_base (2310043)..(2310043): a, c, g or t
  modified_base (2310106)..(2310109): a, c, g or t
  modified_base (2310180)..(2310180): a, c, g or t
  modified_base (2310211)..(2310211): a, c, g or t
  modified_base (2310234)..(2310234): a, c, g or t
  modified_base (2310248)..(2310248): a, c, g or t
  modified_base (2310307)..(2310309): a, c, g or t
  modified_base (2310332)..(2310372): a, c, g or t
  modified_base (2310525)..(2310525): a, c, g or t
  modified_base (2310551)..(2310551): a, c, g or t
  modified_base (2310556)..(2310556): a, c, g or t
  modified_base (2310610)..(2310610): a, c, g or t
  modified_base (2310614)..(2310614): a, c, g or t
  modified_base (2310617)..(2310617): a, c, g or t
  modified_base (2310622)..(2310639): a, c, g or t
  modified_base (2310649)..(2310649): a, c, g or t
  modified_base (2310662)..(2310663): a, c, g or t
  modified_base (2310671)..(2310671): a, c, g or t
  modified_base (2310725)..(2310773): a, c, g or t
  modified_base (2310802)..(2310802): a, c, g or t
  modified_base (2311098)..(2311101): a, c, g or t
  modified_base (2311155)..(2311192): a, c, g or t
  modified_base (2311264)..(2311264): a, c, g or t
  modified_base (2311291)..(2311291): a, c, g or t
  modified_base (2311304)..(2311307): a, c, g or t
  modified_base (2311318)..(2311319): a, c, g or t
  modified_base (2311332)..(2311335): a, c, g or t
  modified_base (2311341)..(2311342): a, c, g or t
  modified_base (2311344)..(2311390): a, c, g or t
  modified_base (2311392)..(2311393): a, c, g or t
  modified_base (2311431)..(2311431): a, c, g or t
  modified_base (2311459)..(2311615): a, c, g or t
  modified_base (2311647)..(2311648): a, c, g or t
  modified_base (2311671)..(2311673): a, c, g or t
  modified_base (2311675)..(2311729): a, c, g or t
  modified_base (2311766)..(2311848): a, c, g or t
  modified_base (2311859)..(2311860): a, c, g or t
  modified_base (2311932)..(2312019): a, c, g or t
  modified_base (2312279)..(2312284): a, c, g or t
  modified_base (2312304)..(2312320): a, c, g or t
  modified_base (2312334)..(2312334): a, c, g or t
  modified_base (2312339)..(2312340): a, c, g or t
  modified_base (2312343)..(2312343): a, c, g or t
  modified_base (2312426)..(2312466): a, c, g or t
  modified_base (2312472)..(2312473): a, c, g or t
  modified_base (2312488)..(2312587): a, c, g or t
  modified_base (2312628)..(2312642): a, c, g or t
  modified_base (2312647)..(2312648): a, c, g or t
  modified_base (2312716)..(2312723): a, c, g or t
  modified_base (2312746)..(2312850): a, c, g or t
  modified_base (2312875)..(2312934): a, c, g or t
  modified_base (2312958)..(2313029): a, c, g or t
  modified_base (2313031)..(2313031): a, c, g or t
  modified_base (2313068)..(2313113): a, c, g or t
  modified_base (2313155)..(2313197): a, c, g or t
  modified_base (2313241)..(2313241): a, c, g or t
  modified_base (2313277)..(2313277): a, c, g or t
  modified_base (2313280)..(2313280): a, c, g or t
  modified_base (2313311)..(2313351): a, c, g or t
  modified_base (2313365)..(2313365): a, c, g or t
  modified_base (2313370)..(2313370): a, c, g or t
  modified_base (2313403)..(2313403): a, c, g or t
  modified_base (2313439)..(2313439): a, c, g or t
  modified_base (2313463)..(2313463): a, c, g or t
  modified_base (2313519)..(2313519): a, c, g or t
  modified_base (2313552)..(2313553): a, c, g or t
  modified_base (2313556)..(2313598): a, c, g or t
  modified_base (2313605)..(2313605): a, c, g or t
  modified_base (2313673)..(2313676): a, c, g or t
  modified_base (2313685)..(2313724): a, c, g or t
  modified_base (2313738)..(2313738): a, c, g or t
  modified_base (2313819)..(2313819): a, c, g or t
  modified_base (2313823)..(2313843): a, c, g or t
  modified_base (2313912)..(2313912): a, c, g or t
  modified_base (2313978)..(2313978): a, c, g or t
  modified_base (2313987)..(2313987): a, c, g or t
  modified_base (2313996)..(2313996): a, c, g or t
  modified_base (2314018)..(2314062): a, c, g or t
  modified_base (2314181)..(2314181): a, c, g or t
  modified_base (2314334)..(2314374): a, c, g or t
  modified_base (2314523)..(2314523): a, c, g or t
  modified_base (2314604)..(2314604): a, c, g or t
  modified_base (2314644)..(2314681): a, c, g or t
  modified_base (2314685)..(2314686): a, c, g or t
  modified_base (2314710)..(2314713): a, c, g or t
  modified_base (2314721)..(2314721): a, c, g or t
  modified_base (2314756)..(2314756): a, c, g or t
  modified_base (2314835)..(2314885): a, c, g or t
  modified_base (2314907)..(2314946): a, c, g or t
  modified_base (2314979)..(2314979): a, c, g or t
  modified_base (2315009)..(2315009): a, c, g or t
  modified_base (2315027)..(2315027): a, c, g or t
  modified_base (2315033)..(2315034): a, c, g or t
  modified_base (2315037)..(2315077): a, c, g or t
  modified_base (2315090)..(2315095): a, c, g or t
  modified_base (2315322)..(2315322): a, c, g or t
  modified_base (2315337)..(2315337): a, c, g or t
  modified_base (2315355)..(2315355): a, c, g or t
  modified_base (2315358)..(2315360): a, c, g or t
  modified_base (2315366)..(2315406): a, c, g or t
  modified_base (2315409)..(2315409): a, c, g or t
  modified_base (2315457)..(2315502): a, c, g or t
  modified_base (2315511)..(2315511): a, c, g or t
  modified_base (2315517)..(2315517): a, c, g or t
  modified_base (2315520)..(2315520): a, c, g or t
  modified_base (2315526)..(2315579): a, c, g or t
  modified_base (2315623)..(2315662): a, c, g or t
  modified_base (2315706)..(2315706): a, c, g or t
  modified_base (2315732)..(2315780): a, c, g or t
  modified_base (2315804)..(2315806): a, c, g or t
  modified_base (2315810)..(2315811): a, c, g or t
  modified_base (2315813)..(2315828): a, c, g or t
  modified_base (2315903)..(2315906): a, c, g or t
  modified_base (2315908)..(2315908): a, c, g or t
  modified_base (2316008)..(2316008): a, c, g or t
  modified_base (2316012)..(2316012): a, c, g or t
  modified_base (2316165)..(2316165): a, c, g or t
  modified_base (2316291)..(2316291): a, c, g or t
  modified_base (2316300)..(2316300): a, c, g or t
  modified_base (2316315)..(2316315): a, c, g or t
  modified_base (2316327)..(2316327): a, c, g or t
  modified_base (2316465)..(2316465): a, c, g or t
  modified_base (2316519)..(2316519): a, c, g or t
  modified_base (2316541)..(2316546): a, c, g or t
  modified_base (2316683)..(2316683): a, c, g or t
  modified_base (2316755)..(2316755): a, c, g or t
  modified_base (2316785)..(2316785): a, c, g or t
  modified_base (2316836)..(2316836): a, c, g or t
  modified_base (2316948)..(2316950): a, c, g or t
  modified_base (2317054)..(2317054): a, c, g or t
  modified_base (2317062)..(2317062): a, c, g or t
  modified_base (2317183)..(2317183): a, c, g or t
  modified_base (2317186)..(2317186): a, c, g or t
  modified_base (2317188)..(2317206): a, c, g or t
  modified_base (2317210)..(2317210): a, c, g or t
  modified_base (2317218)..(2317219): a, c, g or t
  modified_base (2317221)..(2317222): a, c, g or t
  modified_base (2317375)..(2317375): a, c, g or t
  modified_base (2317399)..(2317399): a, c, g or t
  modified_base (2317486)..(2317486): a, c, g or t
  modified_base (2317726)..(2317726): a, c, g or t
  modified_base (2317737)..(2317737): a, c, g or t
  modified_base (2317749)..(2317749): a, c, g or t
  modified_base (2317797)..(2317797): a, c, g or t
  modified_base (2317813)..(2317813): a, c, g or t
  modified_base (2317903)..(2317903): a, c, g or t
  modified_base (2319617)..(2319617): a, c, g or t
  modified_base (2319671)..(2319671): a, c, g or t
  modified_base (2319673)..(2319676): a, c, g or t
  modified_base (2319782)..(2319782): a, c, g or t
  modified_base (2320203)..(2320203): a, c, g or t
  modified_base (2320273)..(2320278): a, c, g or t
  modified_base (2320282)..(2320282): a, c, g or t
  modified_base (2320333)..(2320336): a, c, g or t
  modified_base (2320339)..(2320339): a, c, g or t
  modified_base (2320383)..(2320400): a, c, g or t
  modified_base (2320412)..(2320412): a, c, g or t
  modified_base (2320526)..(2320526): a, c, g or t
  modified_base (2320595)..(2320643): a, c, g or t
  modified_base (2320646)..(2320646): a, c, g or t
  modified_base (2320673)..(2320673): a, c, g or t
  modified_base (2320675)..(2320720): a, c, g or t
  modified_base (2320731)..(2320732): a, c, g or t
  modified_base (2320742)..(2320782): a, c, g or t
  modified_base (2320803)..(2320816): a, c, g or t
  modified_base (2320830)..(2320836): a, c, g or t
  modified_base (2320842)..(2320842): a, c, g or t
  modified_base (2320845)..(2320845): a, c, g or t
  modified_base (2320848)..(2320848): a, c, g or t
  modified_base (2320896)..(2320896): a, c, g or t
  modified_base (2320987)..(2320990): a, c, g or t
  modified_base (2321056)..(2321056): a, c, g or t
  modified_base (2321156)..(2321196): a, c, g or t
  modified_base (2321957)..(2321957): a, c, g or t
  modified_base (2321963)..(2321963): a, c, g or t
  modified_base (2321999)..(2322002): a, c, g or t
  modified_base (2322005)..(2322029): a, c, g or t
  modified_base (2322035)..(2322039): a, c, g or t
  modified_base (2322181)..(2322181): a, c, g or t
  modified_base (2322734)..(2322734): a, c, g or t
  modified_base (2322741)..(2322743): a, c, g or t
  modified_base (2322751)..(2322752): a, c, g or t
  modified_base (2323168)..(2323209): a, c, g or t
  modified_base (2323774)..(2323774): a, c, g or t
  modified_base (2323866)..(2323867): a, c, g or t
  modified_base (2324051)..(2324091): a, c, g or t
  modified_base (2325273)..(2325273): a, c, g or t
  modified_base (2327022)..(2327022): a, c, g or t
  modified_base (2327418)..(2327418): a, c, g or t
  modified_base (2327895)..(2327895): a, c, g or t
  modified_base (2328847)..(2328847): a, c, g or t
  modified_base (2328850)..(2328952): a, c, g or t
  modified_base (2328984)..(2328989): a, c, g or t
  modified_base (2328994)..(2329043): a, c, g or t
  modified_base (2329077)..(2329077): a, c, g or t
  modified_base (2329178)..(2329178): a, c, g or t
  modified_base (2329187)..(2329229): a, c, g or t
  modified_base (2329325)..(2329332): a, c, g or t
  modified_base (2329362)..(2329363): a, c, g or t
  modified_base (2329392)..(2329392): a, c, g or t
  modified_base (2329404)..(2329417): a, c, g or t
  modified_base (2329443)..(2329499): a, c, g or t
  modified_base (2329534)..(2329639): a, c, g or t
  modified_base (2329674)..(2329674): a, c, g or t
  modified_base (2329677)..(2329885): a, c, g or t
  modified_base (2329887)..(2329888): a, c, g or t
  modified_base (2329909)..(2330163): a, c, g or t
  modified_base (2330165)..(2330171): a, c, g or t
  modified_base (2330177)..(2330177): a, c, g or t
  modified_base (2330194)..(2330201): a, c, g or t
  modified_base (2330212)..(2330212): a, c, g or t
  modified_base (2330226)..(2330249): a, c, g or t
  modified_base (2330259)..(2330260): a, c, g or t
  modified_base (2330274)..(2330274): a, c, g or t
  modified_base (2330280)..(2330281): a, c, g or t
  modified_base (2330318)..(2330319): a, c, g or t
  modified_base (2330324)..(2330347): a, c, g or t
  modified_base (2330355)..(2330356): a, c, g or t
  modified_base (2330385)..(2330385): a, c, g or t
  modified_base (2330387)..(2330395): a, c, g or t
  modified_base (2330397)..(2330398): a, c, g or t
  modified_base (2330402)..(2330403): a, c, g or t
  modified_base (2330406)..(2330406): a, c, g or t
  modified_base (2330419)..(2330438): a, c, g or t
  modified_base (2330491)..(2330572): a, c, g or t
  modified_base (2330586)..(2330586): a, c, g or t
  modified_base (2330589)..(2330591): a, c, g or t
  modified_base (2330593)..(2330594): a, c, g or t
  modified_base (2330596)..(2330604): a, c, g or t
  modified_base (2330655)..(2330655): a, c, g or t
  modified_base (2330658)..(2330664): a, c, g or t
  modified_base (2330755)..(2330779): a, c, g or t
  modified_base (2330791)..(2330792): a, c, g or t
  modified_base (2330803)..(2330817): a, c, g or t
  modified_base (2330841)..(2330857): a, c, g or t
  modified_base (2330914)..(2330953): a, c, g or t
  modified_base (2331105)..(2331156): a, c, g or t
  modified_base (2331179)..(2331179): a, c, g or t
  modified_base (2331201)..(2331248): a, c, g or t
  modified_base (2331262)..(2331262): a, c, g or t
  modified_base (2331364)..(2331364): a, c, g or t
  modified_base (2331403)..(2331465): a, c, g or t
  modified_base (2331689)..(2331696): a, c, g or t
  modified_base (2332026)..(2332066): a, c, g or t
  modified_base (2332192)..(2332239): a, c, g or t
  modified_base (2332247)..(2332247): a, c, g or t
  modified_base (2332304)..(2332307): a, c, g or t
  modified_base (2332335)..(2332336): a, c, g or t
  modified_base (2332338)..(2332341): a, c, g or t
  modified_base (2332416)..(2332453): a, c, g or t
  modified_base (2332486)..(2332486): a, c, g or t
  modified_base (2332537)..(2332594): a, c, g or t
  modified_base (2332966)..(2333017): a, c, g or t
  modified_base (2333022)..(2333023): a, c, g or t
  modified_base (2333086)..(2333089): a, c, g or t
  modified_base (2333375)..(2333434): a, c, g or t
  modified_base (2333447)..(2333448): a, c, g or t
  modified_base (2333452)..(2333453): a, c, g or t
  modified_base (2333456)..(2333464): a, c, g or t
  modified_base (2333466)..(2333466): a, c, g or t
  modified_base (2333555)..(2333555): a, c, g or t
  modified_base (2333595)..(2333676): a, c, g or t
  modified_base (2333678)..(2333681): a, c, g or t
  modified_base (2333683)..(2333683): a, c, g or t
  modified_base (2333703)..(2333705): a, c, g or t
  modified_base (2333716)..(2333720): a, c, g or t
  modified_base (2333790)..(2333790): a, c, g or t
  modified_base (2333792)..(2333800): a, c, g or t
  modified_base (2333867)..(2333907): a, c, g or t
  modified_base (2333909)..(2333910): a, c, g or t
  modified_base (2333923)..(2333924): a, c, g or t
  modified_base (2333952)..(2333959): a, c, g or t
  modified_base (2334016)..(2334016): a, c, g or t
  modified_base (2334028)..(2334030): a, c, g or t
  modified_base (2334033)..(2334034): a, c, g or t
  modified_base (2334036)..(2334048): a, c, g or t
  modified_base (2334085)..(2334141): a, c, g or t
  modified_base (2334147)..(2334147): a, c, g or t
  modified_base (2334276)..(2334315): a, c, g or t
  modified_base (2334391)..(2334430): a, c, g or t
  modified_base (2334465)..(2334465): a, c, g or t
  modified_base (2334496)..(2334537): a, c, g or t
  modified_base (2334681)..(2334721): a, c, g or t
  modified_base (2335005)..(2335005): a, c, g or t
  modified_base (2335128)..(2335128): a, c, g or t
  modified_base (2335478)..(2335480): a, c, g or t
  modified_base (2335482)..(2335525): a, c, g or t
  modified_base (2335543)..(2335543): a, c, g or t
  modified_base (2335621)..(2335624): a, c, g or t
  modified_base (2335626)..(2335693): a, c, g or t
  modified_base (2335715)..(2335715): a, c, g or t
  modified_base (2335720)..(2335745): a, c, g or t
  modified_base (2335749)..(2335750): a, c, g or t
  modified_base (2335792)..(2335793): a, c, g or t
  modified_base (2335795)..(2335797): a, c, g or t
  modified_base (2335799)..(2335803): a, c, g or t
  modified_base (2335824)..(2335858): a, c, g or t
  modified_base (2335874)..(2335874): a, c, g or t
  modified_base (2335884)..(2335884): a, c, g or t
  modified_base (2335913)..(2335914): a, c, g or t
  modified_base (2335971)..(2335996): a, c, g or t
  modified_base (2336002)..(2336003): a, c, g or t
  modified_base (2336047)..(2336121): a, c, g or t
  modified_base (2336129)..(2336129): a, c, g or t
  modified_base (2336141)..(2336142): a, c, g or t
  modified_base (2336144)..(2336176): a, c, g or t
  modified_base (2336201)..(2336201): a, c, g or t
  modified_base (2336203)..(2336204): a, c, g or t
  modified_base (2336231)..(2336265): a, c, g or t
  modified_base (2336282)..(2336282): a, c, g or t
  modified_base (2336306)..(2336316): a, c, g or t
  modified_base (2336333)..(2336333): a, c, g or t
  modified_base (2336336)..(2336336): a, c, g or t
  modified_base (2336340)..(2336360): a, c, g or t
  modified_base (2336371)..(2336372): a, c, g or t
  modified_base (2336374)..(2336375): a, c, g or t
  modified_base (2336378)..(2336378): a, c, g or t
  modified_base (2336381)..(2336382): a, c, g or t
  modified_base (2336388)..(2336390): a, c, g or t
  modified_base (2336401)..(2336402): a, c, g or t
  modified_base (2336409)..(2336412): a, c, g or t
  modified_base (2336420)..(2336495): a, c, g or t
  modified_base (2336511)..(2336511): a, c, g or t
  modified_base (2336519)..(2336545): a, c, g or t
  modified_base (2336582)..(2336583): a, c, g or t
  modified_base (2336601)..(2336601): a, c, g or t
  modified_base (2336605)..(2336621): a, c, g or t
  modified_base (2336626)..(2336626): a, c, g or t
  modified_base (2336628)..(2336630): a, c, g or t
  modified_base (2336684)..(2336684): a, c, g or t
  modified_base (2336693)..(2336693): a, c, g or t
  modified_base (2336697)..(2336727): a, c, g or t
  modified_base (2336732)..(2336734): a, c, g or t
  modified_base (2336768)..(2336768): a, c, g or t
  modified_base (2336795)..(2336795): a, c, g or t
  modified_base (2336802)..(2336809): a, c, g or t
  modified_base (2336840)..(2336841): a, c, g or t
  modified_base (2336843)..(2336878): a, c, g or t
  modified_base (2336882)..(2336883): a, c, g or t
  modified_base (2336888)..(2336889): a, c, g or t
  modified_base (2336896)..(2336897): a, c, g or t
  modified_base (2336899)..(2336933): a, c, g or t
  modified_base (2336942)..(2336942): a, c, g or t
  modified_base (2337063)..(2337063): a, c, g or t
  modified_base (2337347)..(2337349): a, c, g or t
  modified_base (2337438)..(2337439): a, c, g or t
  modified_base (2337725)..(2337751): a, c, g or t
  modified_base (2338050)..(2338050): a, c, g or t
  modified_base (2338206)..(2338208): a, c, g or t
  modified_base (2338210)..(2338214): a, c, g or t
  modified_base (2338218)..(2338219): a, c, g or t
  modified_base (2338252)..(2338314): a, c, g or t
  modified_base (2338357)..(2338386): a, c, g or t
  modified_base (2338390)..(2338391): a, c, g or t
  modified_base (2338403)..(2338403): a, c, g or t
  modified_base (2338407)..(2338407): a, c, g or t
  modified_base (2338409)..(2338410): a, c, g or t
  modified_base (2339040)..(2339041): a, c, g or t
  modified_base (2340101)..(2340101): a, c, g or t
  modified_base (2340209)..(2340209): a, c, g or t
  modified_base (2341096)..(2341096): a, c, g or t
  modified_base (2341482)..(2341482): a, c, g or t
  modified_base (2341517)..(2341517): a, c, g or t
  modified_base (2341570)..(2341570): a, c, g or t
  modified_base (2341948)..(2341948): a, c, g or t
  modified_base (2342183)..(2342184): a, c, g or t
  modified_base (2342653)..(2342654): a, c, g or t
  modified_base (2343190)..(2343191): a, c, g or t
  modified_base (2343661)..(2343662): a, c, g or t
  modified_base (2343760)..(2343760): a, c, g or t
  modified_base (2345077)..(2345077): a, c, g or t
  modified_base (2345364)..(2345364): a, c, g or t
  modified_base (2345596)..(2345596): a, c, g or t
  modified_base (2345598)..(2345599): a, c, g or t
  modified_base (2345624)..(2345624): a, c, g or t
  modified_base (2345912)..(2345913): a, c, g or t
  modified_base (2345977)..(2345978): a, c, g or t
  modified_base (2346920)..(2346920): a, c, g or t
  modified_base (2347710)..(2347719): a, c, g or t
  modified_base (2347944)..(2347947): a, c, g or t
  modified_base (2347952)..(2347952): a, c, g or t
  modified_base (2348602)..(2348642): a, c, g or t
  modified_base (2348663)..(2348705): a, c, g or t
  modified_base (2348728)..(2348768): a, c, g or t
  modified_base (2348792)..(2348832): a, c, g or t
  modified_base (2348858)..(2348858): a, c, g or t
  modified_base (2348860)..(2348898): a, c, g or t
  modified_base (2348922)..(2348961): a, c, g or t
  modified_base (2349003)..(2349011): a, c, g or t
  modified_base (2354137)..(2354137): a, c, g or t
  modified_base (2354149)..(2354149): a, c, g or t
  modified_base (2355304)..(2355304): a, c, g or t
  modified_base (2355325)..(2355325): a, c, g or t
  modified_base (2355338)..(2355338): a, c, g or t
  modified_base (2355683)..(2355683): a, c, g or t
  modified_base (2355712)..(2355712): a, c, g or t
  modified_base (2355725)..(2355725): a, c, g or t
  modified_base (2356518)..(2356521): a, c, g or t
  modified_base (2356945)..(2356945): a, c, g or t
  modified_base (2358816)..(2358816): a, c, g or t
  modified_base (2359731)..(2359736): a, c, g or t
  modified_base (2360809)..(2360810): a, c, g or t
  modified_base (2361034)..(2361034): a, c, g or t
  modified_base (2361283)..(2361283): a, c, g or t
  modified_base (2363173)..(2363174): a, c, g or t
  modified_base (2363177)..(2363179): a, c, g or t
  modified_base (2363346)..(2363349): a, c, g or t
  modified_base (2363389)..(2363391): a, c, g or t
  modified_base (2363668)..(2363668): a, c, g or t
  modified_base (2365723)..(2365723): a, c, g or t
  modified_base (2366181)..(2366190): a, c, g or t
  modified_base (2366406)..(2366413): a, c, g or t
  modified_base (2368192)..(2368192): a, c, g or t
  modified_base (2368671)..(2368671): a, c, g or t
  modified_base (2368746)..(2368746): a, c, g or t
  modified_base (2369318)..(2369318): a, c, g or t
  modified_base (2369320)..(2369322): a, c, g or t
  modified_base (2370530)..(2370530): a, c, g or t
  modified_base (2370704)..(2370704): a, c, g or t
  modified_base (2370708)..(2370708): a, c, g or t
  modified_base (2371116)..(2371116): a, c, g or t
  modified_base (2374782)..(2374782): a, c, g or t
  modified_base (2375594)..(2375597): a, c, g or t
  modified_base (2375689)..(2375692): a, c, g or t
  modified_base (2375990)..(2375990): a, c, g or t
  modified_base (2377589)..(2377589): a, c, g or t
  modified_base (2379803)..(2379803): a, c, g or t
  modified_base (2384380)..(2384380): a, c, g or t
  modified_base (2384534)..(2384535): a, c, g or t
  modified_base (2385449)..(2385450): a, c, g or t
  modified_base (2385485)..(2385486): a, c, g or t
  modified_base (2385492)..(2385498): a, c, g or t
  modified_base (2385574)..(2385690): a, c, g or t
  modified_base (2385722)..(2385725): a, c, g or t
  modified_base (2386088)..(2386088): a, c, g or t
  modified_base (2386090)..(2386091): a, c, g or t
  modified_base (2387456)..(2387457): a, c, g or t
  modified_base (2387459)..(2387460): a, c, g or t
  modified_base (2387517)..(2387519): a, c, g or t
  modified_base (2387840)..(2387840): a, c, g or t
  modified_base (2390132)..(2390132): a, c, g or t
  modified_base (2390275)..(2390275): a, c, g or t
  modified_base (2391458)..(2391458): a, c, g or t
  modified_base (2395031)..(2395035): a, c, g or t
  modified_base (2398174)..(2398174): a, c, g or t
  modified_base (2399148)..(2399148): a, c, g or t
  modified_base (2399219)..(2399223): a, c, g or t
  modified_base (2400774)..(2400774): a, c, g or t
  modified_base (2400806)..(2400806): a, c, g or t
  modified_base (2400825)..(2400830): a, c, g or t
  modified_base (2401194)..(2401194): a, c, g or t
  modified_base (2401642)..(2401642): a, c, g or t
  modified_base (2406672)..(2406675): a, c, g or t
  modified_base (2406778)..(2406782): a, c, g or t
  modified_base (2407667)..(2407667): a, c, g or t
  modified_base (2409963)..(2409964): a, c, g or t
  modified_base (2410236)..(2410239): a, c, g or t
  modified_base (2410283)..(2410283): a, c, g or t
  modified_base (2410357)..(2410361): a, c, g or t
  modified_base (2410364)..(2410364): a, c, g or t
  modified_base (2411914)..(2411914): a, c, g or t
  modified_base (2415771)..(2415774): a, c, g or t
  modified_base (2416399)..(2416400): a, c, g or t
  modified_base (2416406)..(2416407): a, c, g or t
  modified_base (2419025)..(2419026): a, c, g or t
  modified_base (2419132)..(2419135): a, c, g or t
  modified_base (2419137)..(2419138): a, c, g or t
  modified_base (2423085)..(2423086): a, c, g or t
  modified_base (2423655)..(2423658): a, c, g or t
  modified_base (2423662)..(2423672): a, c, g or t
  modified_base (2423795)..(2423810): a, c, g or t
  modified_base (2424695)..(2424696): a, c, g or t
  modified_base (2424698)..(2424701): a, c, g or t
  modified_base (2424737)..(2424746): a, c, g or t
  modified_base (2424902)..(2424903): a, c, g or t
  modified_base (2425955)..(2425956): a, c, g or t
  modified_base (2427322)..(2427323): a, c, g or t
  modified_base (2427528)..(2427529): a, c, g or t
  modified_base (2428812)..(2428824): a, c, g or t
  modified_base (2429615)..(2429625): a, c, g or t
  modified_base (2429628)..(2429629): a, c, g or t
  modified_base (2430550)..(2430553): a, c, g or t
  modified_base (2431764)..(2431765): a, c, g or t
  modified_base (2431768)..(2431774): a, c, g or t
  modified_base (2433072)..(2433080): a, c, g or t
  modified_base (2434190)..(2434194): a, c, g or t
  modified_base (2434280)..(2434319): a, c, g or t
  modified_base (2434400)..(2434439): a, c, g or t
  modified_base (2435669)..(2435669): a, c, g or t
  modified_base (2435672)..(2435677): a, c, g or t
  modified_base (2436931)..(2436931): a, c, g or t
  modified_base (2438463)..(2438463): a, c, g or t
  modified_base (2438476)..(2438479): a, c, g or t
  modified_base (2438659)..(2438662): a, c, g or t
  modified_base (2439809)..(2439815): a, c, g or t
  modified_base (2439853)..(2439853): a, c, g or t
  modified_base (2440058)..(2440058): a, c, g or t
  modified_base (2442035)..(2442050): a, c, g or t
  modified_base (2442068)..(2442068): a, c, g or t
  modified_base (2442147)..(2442150): a, c, g or t
  modified_base (2442154)..(2442154): a, c, g or t
  modified_base (2442254)..(2442259): a, c, g or t
  modified_base (2442333)..(2442334): a, c, g or t
  modified_base (2442503)..(2442504): a, c, g or t
  modified_base (2444244)..(2444244): a, c, g or t
  modified_base (2444523)..(2444528): a, c, g or t
  modified_base (2444663)..(2444667): a, c, g or t
  modified_base (2445080)..(2445080): a, c, g or t
  modified_base (2445083)..(2445083): a, c, g or t
  modified_base (2445225)..(2445229): a, c, g or t
  modified_base (2445349)..(2445349): a, c, g or t
  modified_base (2446713)..(2446713): a, c, g or t
  modified_base (2446954)..(2446957): a, c, g or t
  modified_base (2447029)..(2447037): a, c, g or t
  modified_base (2447352)..(2447352): a, c, g or t
  modified_base (2447375)..(2447378): a, c, g or t
  modified_base (2448091)..(2448092): a, c, g or t
  modified_base (2449867)..(2449868): a, c, g or t
  modified_base (2451715)..(2451715): a, c, g or t
  modified_base (2451903)..(2451905): a, c, g or t
  modified_base (2452097)..(2452102): a, c, g or t
  modified_base (2452141)..(2452141): a, c, g or t
  modified_base (2453032)..(2453036): a, c, g or t
  modified_base (2453039)..(2453040): a, c, g or t
  modified_base (2454987)..(2454987): a, c, g or t
  modified_base (2455984)..(2455984): a, c, g or t
  modified_base (2456655)..(2456655): a, c, g or t
  modified_base (2456657)..(2456657): a, c, g or t
  modified_base (2457838)..(2457842): a, c, g or t
  modified_base (2458137)..(2458137): a, c, g or t
  modified_base (2459333)..(2459333): a, c, g or t
  modified_base (2459657)..(2459657): a, c, g or t
  modified_base (2460569)..(2460574): a, c, g or t
  modified_base (2460804)..(2460812): a, c, g or t
  modified_base (2460861)..(2460876): a, c, g or t
  modified_base (2460883)..(2460887): a, c, g or t
  modified_base (2461542)..(2461542): a, c, g or t
  modified_base (2462806)..(2462811): a, c, g or t
  modified_base (2462867)..(2462867): a, c, g or t
  modified_base (2463194)..(2463194): a, c, g or t
  modified_base (2464545)..(2464549): a, c, g or t
  modified_base (2465559)..(2465603): a, c, g or t
  modified_base (2465623)..(2465623): a, c, g or t
  modified_base (2465726)..(2465726): a, c, g or t
  modified_base (2465737)..(2465776): a, c, g or t
  modified_base (2466316)..(2466320): a, c, g or t
  modified_base (2467746)..(2467747): a, c, g or t
  modified_base (2468314)..(2468319): a, c, g or t
  modified_base (2469098)..(2469103): a, c, g or t
  modified_base (2469155)..(2469155): a, c, g or t
  modified_base (2469158)..(2469158): a, c, g or t
  modified_base (2469161)..(2469161): a, c, g or t
  modified_base (2470080)..(2470081): a, c, g or t
  modified_base (2470954)..(2470959): a, c, g or t
  modified_base (2470996)..(2470996): a, c, g or t
  modified_base (2471004)..(2471004): a, c, g or t
  modified_base (2471615)..(2471615): a, c, g or t
  modified_base (2471665)..(2471669): a, c, g or t
  modified_base (2471759)..(2471763): a, c, g or t
  modified_base (2471778)..(2471778): a, c, g or t
  modified_base (2473846)..(2473849): a, c, g or t
  modified_base (2473910)..(2473913): a, c, g or t
  modified_base (2473936)..(2473937): a, c, g or t
  modified_base (2474002)..(2474002): a, c, g or t
  modified_base (2474476)..(2474476): a, c, g or t
  modified_base (2474521)..(2474521): a, c, g or t
  modified_base (2475132)..(2475135): a, c, g or t
  modified_base (2475217)..(2475217): a, c, g or t
  modified_base (2475379)..(2475380): a, c, g or t
  modified_base (2475384)..(2475391): a, c, g or t
  modified_base (2477794)..(2477794): a, c, g or t
  modified_base (2477799)..(2477799): a, c, g or t
  modified_base (2478667)..(2478670): a, c, g or t
  modified_base (2478818)..(2478818): a, c, g or t
  modified_base (2478832)..(2478832): a, c, g or t
  modified_base (2478852)..(2478852): a, c, g or t
  modified_base (2479070)..(2479081): a, c, g or t
  modified_base (2481456)..(2481456): a, c, g or t
  modified_base (2481538)..(2481538): a, c, g or t
  modified_base (2481964)..(2481967): a, c, g or t
  modified_base (2482144)..(2482149): a, c, g or t
  modified_base (2485041)..(2485042): a, c, g or t
  modified_base (2486726)..(2486726): a, c, g or t
  modified_base (2486958)..(2486958): a, c, g or t
  modified_base (2487431)..(2487435): a, c, g or t
  modified_base (2487471)..(2487471): a, c, g or t
  modified_base (2487680)..(2487680): a, c, g or t
  modified_base (2488798)..(2488798): a, c, g or t
  modified_base (2489140)..(2489143): a, c, g or t
  modified_base (2489310)..(2489313): a, c, g or t
  modified_base (2489315)..(2489320): a, c, g or t
  modified_base (2489480)..(2489483): a, c, g or t
  modified_base (2489596)..(2489599): a, c, g or t
  modified_base (2489601)..(2489614): a, c, g or t
  modified_base (2490647)..(2490647): a, c, g or t
  modified_base (2496717)..(2496720): a, c, g or t
  modified_base (2500859)..(2500896): a, c, g or t
  modified_base (2501034)..(2501077): a, c, g or t
  modified_base (2501695)..(2501695): a, c, g or t
  modified_base (2502321)..(2502329): a, c, g or t
  modified_base (2504069)..(2504069): a, c, g or t
  modified_base (2505410)..(2505410): a, c, g or t
  modified_base (2505553)..(2505553): a, c, g or t
  modified_base (2505556)..(2505560): a, c, g or t
  modified_base (2505584)..(2505584): a, c, g or t
  modified_base (2506706)..(2506706): a, c, g or t
  modified_base (2506886)..(2506886): a, c, g or t
  modified_base (2507412)..(2507421): a, c, g or t
  modified_base (2507519)..(2507519): a, c, g or t
  modified_base (2508426)..(2508426): a, c, g or t
  modified_base (2511396)..(2511396): a, c, g or t
  modified_base (2511398)..(2511401): a, c, g or t
  modified_base (2511407)..(2511407): a, c, g or t
  modified_base (2511566)..(2511570): a, c, g or t
  modified_base (2511643)..(2511643): a, c, g or t
  modified_base (2512041)..(2512045): a, c, g or t
  modified_base (2512049)..(2512049): a, c, g or t
  modified_base (2513078)..(2513078): a, c, g or t
  modified_base (2513253)..(2513253): a, c, g or t
  modified_base (2513543)..(2513543): a, c, g or t
  modified_base (2514290)..(2514290): a, c, g or t
  modified_base (2515213)..(2515214): a, c, g or t
  modified_base (2515216)..(2515222): a, c, g or t
  modified_base (2515272)..(2515280): a, c, g or t
  modified_base (2515285)..(2515288): a, c, g or t
  modified_base (2516358)..(2516358): a, c, g or t
  modified_base (2516475)..(2516475): a, c, g or t
  modified_base (2516722)..(2516726): a, c, g or t
  modified_base (2516900)..(2516903): a, c, g or t
  modified_base (2517311)..(2517312): a, c, g or t
  modified_base (2519031)..(2519031): a, c, g or t
  modified_base (2520332)..(2520333): a, c, g or t
  modified_base (2520335)..(2520336): a, c, g or t
  modified_base (2521235)..(2521236): a, c, g or t
  modified_base (2522202)..(2522202): a, c, g or t
  modified_base (2522561)..(2522561): a, c, g or t
  modified_base (2523106)..(2523107): a, c, g or t
  modified_base (2523255)..(2523256): a, c, g or t
  modified_base (2523262)..(2523264): a, c, g or t
  modified_base (2523312)..(2523314): a, c, g or t
  modified_base (2523316)..(2523317): a, c, g or t
  modified_base (2523325)..(2523326): a, c, g or t
  modified_base (2524131)..(2524131): a, c, g or t
  modified_base (2524560)..(2524566): a, c, g or t
  modified_base (2524687)..(2524690): a, c, g or t
  modified_base (2525207)..(2525207): a, c, g or t
  modified_base (2525681)..(2525681): a, c, g or t
  modified_base (2526598)..(2526598): a, c, g or t
  modified_base (2526672)..(2526677): a, c, g or t
  modified_base (2528643)..(2528643): a, c, g or t
  modified_base (2528679)..(2528725): a, c, g or t
  modified_base (2528768)..(2528769): a, c, g or t
  modified_base (2528773)..(2528774): a, c, g or t
  modified_base (2529244)..(2529244): a, c, g or t
  modified_base (2530175)..(2530175): a, c, g or t
  modified_base (2531843)..(2531843): a, c, g or t
  modified_base (2532702)..(2532702): a, c, g or t
  modified_base (2533937)..(2533937): a, c, g or t
  modified_base (2533967)..(2533967): a, c, g or t
  modified_base (2534196)..(2534196): a, c, g or t
  modified_base (2535136)..(2535136): a, c, g or t
  modified_base (2535140)..(2535141): a, c, g or t
  modified_base (2535147)..(2535148): a, c, g or t
  modified_base (2535213)..(2535213): a, c, g or t
  modified_base (2535217)..(2535218): a, c, g or t
  modified_base (2535220)..(2535221): a, c, g or t
  modified_base (2535225)..(2535228): a, c, g or t
  modified_base (2535318)..(2535321): a, c, g or t
  modified_base (2535357)..(2535357): a, c, g or t
  modified_base (2535360)..(2535360): a, c, g or t
  modified_base (2535364)..(2535376): a, c, g or t
  modified_base (2535575)..(2535614): a, c, g or t
  modified_base (2535616)..(2535617): a, c, g or t
  modified_base (2535671)..(2535672): a, c, g or t
  modified_base (2535678)..(2535728): a, c, g or t
  modified_base (2535739)..(2535740): a, c, g or t
  modified_base (2535743)..(2535744): a, c, g or t
  modified_base (2535752)..(2535773): a, c, g or t
  modified_base (2535775)..(2535776): a, c, g or t
  modified_base (2535780)..(2535781): a, c, g or t
  modified_base (2535796)..(2535797): a, c, g or t
  modified_base (2535803)..(2535804): a, c, g or t
  modified_base (2535817)..(2535819): a, c, g or t
  modified_base (2535867)..(2535934): a, c, g or t
  modified_base (2535941)..(2535941): a, c, g or t
  modified_base (2535958)..(2536043): a, c, g or t
  modified_base (2536795)..(2536795): a, c, g or t
  modified_base (2537967)..(2537970): a, c, g or t
  modified_base (2538177)..(2538181): a, c, g or t
  modified_base (2538363)..(2538366): a, c, g or t
  modified_base (2538433)..(2538433): a, c, g or t
  modified_base (2539027)..(2539028): a, c, g or t
  modified_base (2539599)..(2539599): a, c, g or t
  modified_base (2540057)..(2540061): a, c, g or t
  modified_base (2540756)..(2540759): a, c, g or t
  modified_base (2541642)..(2541642): a, c, g or t
  modified_base (2541705)..(2541705): a, c, g or t
  modified_base (2544698)..(2544701): a, c, g or t
  modified_base (2545215)..(2545218): a, c, g or t
  modified_base (2545817)..(2545817): a, c, g or t
  modified_base (2545890)..(2545891): a, c, g or t
  modified_base (2548138)..(2548141): a, c, g or t
  modified_base (2548176)..(2548179): a, c, g or t
  modified_base (2548537)..(2548538): a, c, g or t
  modified_base (2548885)..(2548885): a, c, g or t
  modified_base (2548911)..(2548911): a, c, g or t
  modified_base (2548933)..(2548952): a, c, g or t
  modified_base (2549421)..(2549424): a, c, g or t
  modified_base (2549629)..(2549629): a, c, g or t
  modified_base (2549790)..(2549834): a, c, g or t
  modified_base (2549933)..(2549938): a, c, g or t
  modified_base (2549940)..(2549988): a, c, g or t
  modified_base (2550040)..(2550040): a, c, g or t
  modified_base (2550082)..(2550082): a, c, g or t
  modified_base (2550112)..(2550112): a, c, g or t
  modified_base (2550161)..(2550161): a, c, g or t
  modified_base (2550188)..(2550188): a, c, g or t
  modified_base (2550219)..(2550219): a, c, g or t
  modified_base (2550287)..(2550287): a, c, g or t
  modified_base (2550314)..(2550314): a, c, g or t
  modified_base (2550343)..(2550343): a, c, g or t
  modified_base (2550446)..(2550454): a, c, g or t
  modified_base (2550529)..(2550530): a, c, g or t
  modified_base (2550707)..(2550707): a, c, g or t
  modified_base (2550709)..(2550729): a, c, g or t
  modified_base (2550760)..(2550761): a, c, g or t
  modified_base (2550764)..(2550804): a, c, g or t
  modified_base (2550883)..(2550886): a, c, g or t
  modified_base (2550888)..(2550891): a, c, g or t
  modified_base (2550893)..(2550893): a, c, g or t
  modified_base (2550929)..(2550973): a, c, g or t
  modified_base (2551023)..(2551025): a, c, g or t
  modified_base (2551068)..(2551071): a, c, g or t
  modified_base (2551096)..(2551097): a, c, g or t
  modified_base (2551110)..(2551110): a, c, g or t
  modified_base (2551137)..(2551137): a, c, g or t
  modified_base (2551182)..(2551182): a, c, g or t
  modified_base (2551212)..(2551263): a, c, g or t
  modified_base (2551297)..(2551340): a, c, g or t
  modified_base (2551342)..(2551344): a, c, g or t
  modified_base (2551368)..(2551369): a, c, g or t
  modified_base (2551371)..(2551373): a, c, g or t
  modified_base (2551406)..(2551461): a, c, g or t
  modified_base (2551507)..(2551508): a, c, g or t
  modified_base (2551511)..(2551513): a, c, g or t
  modified_base (2551543)..(2551551): a, c, g or t
  modified_base (2551557)..(2551559): a, c, g or t
  modified_base (2551578)..(2551579): a, c, g or t
  modified_base (2551632)..(2551633): a, c, g or t
  modified_base (2551638)..(2551667): a, c, g or t
  modified_base (2551669)..(2551670): a, c, g or t
  modified_base (2551695)..(2551784): a, c, g or t
  modified_base (2551800)..(2551800): a, c, g or t
  modified_base (2551826)..(2551840): a, c, g or t
  modified_base (2551864)..(2551864): a, c, g or t
  modified_base (2551867)..(2551868): a, c, g or t
  modified_base (2551886)..(2551887): a, c, g or t
  modified_base (2551940)..(2551941): a, c, g or t
  modified_base (2551943)..(2551944): a, c, g or t
  modified_base (2551947)..(2551950): a, c, g or t
  modified_base (2551969)..(2551990): a, c, g or t
  modified_base (2552015)..(2552021): a, c, g or t
  modified_base (2552024)..(2552025): a, c, g or t
  modified_base (2552042)..(2552050): a, c, g or t
  modified_base (2552174)..(2552174): a, c, g or t
  modified_base (2552203)..(2552203): a, c, g or t
  modified_base (2552257)..(2552257): a, c, g or t
  modified_base (2552270)..(2552270): a, c, g or t
  modified_base (2552304)..(2552305): a, c, g or t
  modified_base (2552309)..(2552310): a, c, g or t
  modified_base (2552314)..(2552315): a, c, g or t
  modified_base (2552317)..(2552371): a, c, g or t
  modified_base (2552410)..(2552410): a, c, g or t
  modified_base (2552414)..(2552414): a, c, g or t
  modified_base (2552436)..(2552438): a, c, g or t
  modified_base (2552474)..(2552474): a, c, g or t
  modified_base (2552492)..(2552492): a, c, g or t
  modified_base (2552514)..(2552514): a, c, g or t
  modified_base (2552581)..(2552581): a, c, g or t
  modified_base (2552674)..(2552674): a, c, g or t
  modified_base (2552719)..(2552719): a, c, g or t
  modified_base (2552740)..(2552740): a, c, g or t
  modified_base (2552968)..(2552968): a, c, g or t
  modified_base (2552973)..(2552975): a, c, g or t
  modified_base (2553106)..(2553111): a, c, g or t
  modified_base (2553115)..(2553162): a, c, g or t
  modified_base (2553203)..(2553206): a, c, g or t
  modified_base (2553209)..(2553209): a, c, g or t
  modified_base (2553318)..(2553422): a, c, g or t
  modified_base (2553446)..(2553446): a, c, g or t
  modified_base (2553471)..(2553471): a, c, g or t
  modified_base (2553482)..(2553520): a, c, g or t
  modified_base (2553593)..(2553602): a, c, g or t
  modified_base (2553609)..(2553610): a, c, g or t
  modified_base (2553655)..(2553700): a, c, g or t
  modified_base (2553750)..(2553750): a, c, g or t
  modified_base (2553770)..(2553773): a, c, g or t
  modified_base (2553783)..(2553787): a, c, g or t
  modified_base (2553872)..(2553872): a, c, g or t
  modified_base (2553877)..(2553878): a, c, g or t
  modified_base (2553917)..(2553920): a, c, g or t
  modified_base (2553925)..(2553942): a, c, g or t
  modified_base (2554019)..(2554021): a, c, g or t
  modified_base (2554109)..(2554109): a, c, g or t
  modified_base (2554116)..(2554135): a, c, g or t
  modified_base (2554193)..(2554230): a, c, g or t
  modified_base (2554324)..(2554330): a, c, g or t
  modified_base (2554334)..(2554335): a, c, g or t
  modified_base (2554422)..(2554422): a, c, g or t
  modified_base (2554427)..(2554429): a, c, g or t
  modified_base (2554616)..(2554617): a, c, g or t
  modified_base (2554629)..(2554629): a, c, g or t
  modified_base (2554665)..(2554666): a, c, g or t
  modified_base (2554673)..(2554697): a, c, g or t
  modified_base (2554709)..(2554710): a, c, g or t
  modified_base (2554721)..(2554733): a, c, g or t
  modified_base (2554749)..(2554750): a, c, g or t
  modified_base (2554779)..(2554781): a, c, g or t
  modified_base (2554783)..(2554783): a, c, g or t
  modified_base (2554795)..(2554795): a, c, g or t
  modified_base (2554878)..(2554878): a, c, g or t
  modified_base (2554965)..(2554965): a, c, g or t
  modified_base (2555022)..(2555029): a, c, g or t
  modified_base (2555055)..(2555055): a, c, g or t
  modified_base (2555058)..(2555058): a, c, g or t
  modified_base (2555166)..(2555166): a, c, g or t
  modified_base (2555175)..(2555175): a, c, g or t
  modified_base (2555392)..(2555395): a, c, g or t
  modified_base (2555402)..(2555445): a, c, g or t
  modified_base (2555528)..(2555572): a, c, g or t
  modified_base (2555598)..(2555598): a, c, g or t
  modified_base (2555621)..(2555621): a, c, g or t
  modified_base (2555630)..(2555630): a, c, g or t
  modified_base (2555637)..(2555637): a, c, g or t
  modified_base (2555754)..(2555754): a, c, g or t
  modified_base (2555757)..(2555757): a, c, g or t
  modified_base (2555779)..(2555822): a, c, g or t
  modified_base (2555824)..(2555824): a, c, g or t
  modified_base (2555854)..(2555854): a, c, g or t
  modified_base (2555873)..(2555914): a, c, g or t
  modified_base (2556000)..(2556002): a, c, g or t
  modified_base (2556161)..(2556167): a, c, g or t
  modified_base (2556273)..(2556273): a, c, g or t
  modified_base (2556276)..(2556374): a, c, g or t
  modified_base (2556506)..(2556508): a, c, g or t
  modified_base (2556703)..(2556703): a, c, g or t
  modified_base (2556758)..(2556758): a, c, g or t
  modified_base (2556768)..(2556768): a, c, g or t
  modified_base (2556793)..(2556857): a, c, g or t
  modified_base (2556884)..(2556937): a, c, g or t
  modified_base (2556943)..(2556943): a, c, g or t
  modified_base (2556953)..(2556954): a, c, g or t
  modified_base (2556965)..(2556966): a, c, g or t
  modified_base (2556973)..(2556973): a, c, g or t
  modified_base (2556982)..(2556982): a, c, g or t
  modified_base (2556985)..(2556986): a, c, g or t
  modified_base (2556993)..(2557001): a, c, g or t
  modified_base (2557030)..(2557074): a, c, g or t
  modified_base (2557140)..(2557246): a, c, g or t
  modified_base (2557249)..(2557250): a, c, g or t
  modified_base (2557331)..(2557331): a, c, g or t
  modified_base (2557344)..(2557345): a, c, g or t
  modified_base (2557349)..(2557350): a, c, g or t
  modified_base (2557358)..(2557424): a, c, g or t
  modified_base (2557501)..(2557502): a, c, g or t
  modified_base (2557595)..(2557730): a, c, g or t
  modified_base (2557744)..(2557744): a, c, g or t
  modified_base (2557760)..(2557780): a, c, g or t
  modified_base (2557835)..(2557841): a, c, g or t
  modified_base (2557844)..(2557844): a, c, g or t
  modified_base (2557866)..(2557867): a, c, g or t
  modified_base (2557913)..(2557913): a, c, g or t
  modified_base (2557928)..(2557928): a, c, g or t
  modified_base (2557946)..(2557947): a, c, g or t
  modified_base (2558002)..(2558002): a, c, g or t
  modified_base (2558048)..(2558089): a, c, g or t
  modified_base (2558117)..(2558117): a, c, g or t
  modified_base (2558125)..(2558139): a, c, g or t
  modified_base (2558192)..(2558233): a, c, g or t
  modified_base (2558245)..(2558245): a, c, g or t
  modified_base (2558319)..(2558321): a, c, g or t
  modified_base (2558323)..(2558323): a, c, g or t
  modified_base (2558338)..(2558338): a, c, g or t
  modified_base (2558375)..(2558417): a, c, g or t
  modified_base (2558445)..(2558445): a, c, g or t
  modified_base (2558499)..(2558550): a, c, g or t
  modified_base (2558594)..(2558595): a, c, g or t
  modified_base (2558599)..(2558601): a, c, g or t
  modified_base (2558603)..(2558648): a, c, g or t
  modified_base (2558650)..(2558651): a, c, g or t
  modified_base (2558662)..(2558662): a, c, g or t
  modified_base (2558669)..(2558707): a, c, g or t
  modified_base (2558753)..(2558793): a, c, g or t
  modified_base (2558894)..(2558894): a, c, g or t
  modified_base (2558903)..(2558946): a, c, g or t
  modified_base (2558971)..(2558971): a, c, g or t
  modified_base (2558973)..(2559014): a, c, g or t
  modified_base (2559062)..(2559101): a, c, g or t
  modified_base (2559151)..(2559151): a, c, g or t
  modified_base (2559193)..(2559196): a, c, g or t
  modified_base (2559348)..(2559352): a, c, g or t
  modified_base (2559355)..(2559392): a, c, g or t
  modified_base (2559394)..(2559394): a, c, g or t
  modified_base (2559421)..(2559421): a, c, g or t
  modified_base (2559442)..(2559483): a, c, g or t
  modified_base (2559509)..(2559512): a, c, g or t
  modified_base (2559518)..(2559576): a, c, g or t
  modified_base (2559606)..(2559608): a, c, g or t
  modified_base (2559612)..(2559655): a, c, g or t
  modified_base (2559712)..(2559753): a, c, g or t
  modified_base (2559774)..(2559813): a, c, g or t
  modified_base (2559861)..(2559861): a, c, g or t
  modified_base (2559952)..(2559952): a, c, g or t
  modified_base (2559961)..(2560000): a, c, g or t
  modified_base (2560223)..(2560224): a, c, g or t
  modified_base (2560226)..(2560227): a, c, g or t
  modified_base (2560229)..(2560281): a, c, g or t
  modified_base (2560304)..(2560345): a, c, g or t
  modified_base (2560348)..(2560348): a, c, g or t
  modified_base (2560376)..(2560420): a, c, g or t
  modified_base (2560479)..(2560520): a, c, g or t
  modified_base (2560657)..(2560662): a, c, g or t
  modified_base (2561599)..(2561600): a, c, g or t
  modified_base (2561992)..(2561995): a, c, g or t
  modified_base (2561997)..(2561998): a, c, g or t
  modified_base (2562007)..(2562008): a, c, g or t
  modified_base (2562012)..(2562013): a, c, g or t
  modified_base (2562188)..(2562188): a, c, g or t
  modified_base (2562193)..(2562232): a, c, g or t
  modified_base (2562876)..(2562877): a, c, g or t
  modified_base (2562996)..(2563035): a, c, g or t
  modified_base (2563204)..(2563250): a, c, g or t
  modified_base (2563325)..(2563329): a, c, g or t
  modified_base (2563365)..(2563406): a, c, g or t
  modified_base (2563426)..(2563466): a, c, g or t
  modified_base (2563512)..(2563512): a, c, g or t
  modified_base (2563519)..(2563559): a, c, g or t
  modified_base (2563563)..(2563563): a, c, g or t
  modified_base (2563588)..(2563627): a, c, g or t
  modified_base (2563658)..(2563697): a, c, g or t
  modified_base (2563814)..(2563817): a, c, g or t
  modified_base (2563938)..(2563946): a, c, g or t
  modified_base (2563949)..(2563952): a, c, g or t
  modified_base (2564003)..(2564006): a, c, g or t
  modified_base (2564014)..(2564079): a, c, g or t
  modified_base (2564203)..(2564242): a, c, g or t
  modified_base (2564264)..(2564313): a, c, g or t
  modified_base (2564343)..(2564346): a, c, g or t
  modified_base (2564382)..(2564383): a, c, g or t
  modified_base (2564387)..(2564396): a, c, g or t
  modified_base (2564441)..(2564491): a, c, g or t
  modified_base (2564524)..(2564565): a, c, g or t
  modified_base (2564611)..(2564652): a, c, g or t
  modified_base (2564658)..(2564660): a, c, g or t
  modified_base (2564676)..(2564677): a, c, g or t
  modified_base (2564778)..(2564836): a, c, g or t
  modified_base (2564903)..(2564951): a, c, g or t
  modified_base (2564953)..(2564954): a, c, g or t
  modified_base (2564973)..(2565039): a, c, g or t
  modified_base (2565081)..(2565082): a, c, g or t
  modified_base (2565115)..(2565115): a, c, g or t
  modified_base (2565143)..(2565145): a, c, g or t
  modified_base (2565148)..(2565149): a, c, g or t
  modified_base (2565166)..(2565175): a, c, g or t
  modified_base (2565202)..(2565249): a, c, g or t
  modified_base (2565287)..(2565326): a, c, g or t
  modified_base (2565362)..(2565363): a, c, g or t
  modified_base (2565371)..(2565433): a, c, g or t
  modified_base (2565461)..(2565461): a, c, g or t
  modified_base (2565470)..(2565474): a, c, g or t
  modified_base (2565517)..(2565561): a, c, g or t
  modified_base (2565612)..(2572472): a, c, g or t
  modified_base (2572475)..(2572475): a, c, g or t
  modified_base (2572541)..(2572554): a, c, g or t
  modified_base (2572565)..(2572566): a, c, g or t
  modified_base (2572594)..(2572665): a, c, g or t
  modified_base (2572709)..(2572710): a, c, g or t
  modified_base (2572712)..(2572787): a, c, g or t
  modified_base (2572810)..(2572811): a, c, g or t
  modified_base (2572855)..(2572894): a, c, g or t
  modified_base (2572918)..(2572966): a, c, g or t
  modified_base (2572976)..(2572976): a, c, g or t
  modified_base (2572994)..(2573011): a, c, g or t
  modified_base (2573025)..(2573026): a, c, g or t
  modified_base (2573060)..(2573077): a, c, g or t
  modified_base (2573116)..(2573118): a, c, g or t
  modified_base (2573123)..(2573123): a, c, g or t
  modified_base (2573149)..(2573214): a, c, g or t
  modified_base (2573238)..(2573314): a, c, g or t
  modified_base (2573316)..(2573316): a, c, g or t
  modified_base (2573347)..(2573403): a, c, g or t
  modified_base (2573482)..(2573484): a, c, g or t
  modified_base (2573573)..(2573573): a, c, g or t
  modified_base (2573587)..(2573587): a, c, g or t
  modified_base (2573589)..(2573590): a, c, g or t
  modified_base (2573621)..(2573621): a, c, g or t
  modified_base (2573652)..(2573652): a, c, g or t
  modified_base (2573662)..(2573662): a, c, g or t
  modified_base (2573667)..(2573667): a, c, g or t
  modified_base (2573674)..(2573674): a, c, g or t
  modified_base (2573770)..(2573770): a, c, g or t
  modified_base (2573803)..(2573806): a, c, g or t
  modified_base (2573854)..(2573858): a, c, g or t
  modified_base (2573892)..(2573937): a, c, g or t
  modified_base (2573943)..(2573943): a, c, g or t
  modified_base (2573957)..(2573966): a, c, g or t
  modified_base (2573980)..(2573980): a, c, g or t
  modified_base (2574111)..(2574156): a, c, g or t
  modified_base (2574204)..(2574204): a, c, g or t
  modified_base (2574207)..(2574208): a, c, g or t
  modified_base (2574220)..(2574248): a, c, g or t
  modified_base (2574292)..(2574353): a, c, g or t
  modified_base (2574405)..(2574405): a, c, g or t
  modified_base (2574432)..(2574474): a, c, g or t
  modified_base (2574482)..(2574482): a, c, g or t
  modified_base (2574533)..(2574533): a, c, g or t
  modified_base (2574548)..(2574548): a, c, g or t
  modified_base (2574557)..(2574557): a, c, g or t
  modified_base (2574583)..(2574620): a, c, g or t
  modified_base (2574629)..(2574629): a, c, g or t
  modified_base (2574641)..(2574682): a, c, g or t
  modified_base (2574727)..(2574777): a, c, g or t
  modified_base (2574827)..(2574827): a, c, g or t
  modified_base (2574846)..(2574846): a, c, g or t
  modified_base (2574901)..(2574940): a, c, g or t
  modified_base (2574968)..(2574968): a, c, g or t
  modified_base (2575019)..(2575020): a, c, g or t
  modified_base (2575115)..(2575155): a, c, g or t
  modified_base (2575205)..(2575208): a, c, g or t
  modified_base (2575336)..(2575377): a, c, g or t
  modified_base (2575444)..(2575487): a, c, g or t
  modified_base (2575593)..(2575593): a, c, g or t
  modified_base (2575685)..(2575726): a, c, g or t
  modified_base (2575803)..(2575842): a, c, g or t
  modified_base (2575945)..(2575948): a, c, g or t
  modified_base (2575954)..(2575957): a, c, g or t
  modified_base (2575981)..(2576022): a, c, g or t
  modified_base (2576051)..(2576051): a, c, g or t
  modified_base (2576192)..(2576198): a, c, g or t
  modified_base (2576200)..(2576232): a, c, g or t
  modified_base (2576240)..(2576241): a, c, g or t
  modified_base (2576308)..(2576351): a, c, g or t
  modified_base (2576403)..(2576416): a, c, g or t
  modified_base (2576444)..(2576444): a, c, g or t
  modified_base (2576448)..(2576485): a, c, g or t
  modified_base (2576786)..(2576802): a, c, g or t
  modified_base (2576885)..(2576885): a, c, g or t
  modified_base (2576918)..(2576966): a, c, g or t
  modified_base (2576972)..(2576973): a, c, g or t
  modified_base (2576983)..(2576983): a, c, g or t
  modified_base (2576989)..(2576991): a, c, g or t
  modified_base (2577002)..(2577002): a, c, g or t
  modified_base (2577065)..(2577065): a, c, g or t
  modified_base (2577092)..(2577092): a, c, g or t
  modified_base (2577223)..(2577223): a, c, g or t
  modified_base (2577281)..(2577282): a, c, g or t
  modified_base (2577353)..(2577353): a, c, g or t
  modified_base (2577356)..(2577394): a, c, g or t
  modified_base (2577405)..(2577408): a, c, g or t
  modified_base (2577418)..(2577490): a, c, g or t
  modified_base (2577502)..(2577502): a, c, g or t
  modified_base (2577605)..(2577656): a, c, g or t
  modified_base (2577720)..(2577761): a, c, g or t
  modified_base (2577789)..(2577793): a, c, g or t
  modified_base (2577812)..(2577813): a, c, g or t
  modified_base (2577816)..(2577820): a, c, g or t
  modified_base (2577822)..(2577867): a, c, g or t
  modified_base (2577879)..(2577880): a, c, g or t
  modified_base (2577939)..(2577998): a, c, g or t
  modified_base (2578029)..(2578033): a, c, g or t
  modified_base (2578077)..(2578121): a, c, g or t
  modified_base (2578179)..(2578220): a, c, g or t
  modified_base (2578244)..(2578388): a, c, g or t
  modified_base (2578414)..(2578453): a, c, g or t
  modified_base (2578474)..(2578513): a, c, g or t
  modified_base (2578553)..(2578553): a, c, g or t
  modified_base (2578589)..(2578589): a, c, g or t
  modified_base (2578610)..(2578613): a, c, g or t
  modified_base (2578660)..(2578663): a, c, g or t
  modified_base (2578691)..(2578691): a, c, g or t
  modified_base (2578723)..(2578762): a, c, g or t
  modified_base (2578794)..(2578834): a, c, g or t
  modified_base (2578979)..(2578979): a, c, g or t
  modified_base (2579009)..(2579048): a, c, g or t
  modified_base (2579053)..(2579053): a, c, g or t
  modified_base (2579210)..(2579210): a, c, g or t
  modified_base (2579235)..(2579235): a, c, g or t
  modified_base (2579237)..(2579277): a, c, g or t
  modified_base (2579327)..(2579366): a, c, g or t
  modified_base (2579390)..(2579431): a, c, g or t
  modified_base (2579521)..(2579521): a, c, g or t
  modified_base (2579619)..(2579656): a, c, g or t
  modified_base (2579676)..(2579722): a, c, g or t
  modified_base (2579751)..(2579751): a, c, g or t
  modified_base (2579778)..(2579816): a, c, g or t
  modified_base (2579908)..(2579947): a, c, g or t
  modified_base (2579968)..(2580009): a, c, g or t
  modified_base (2580084)..(2580123): a, c, g or t
  modified_base (2580174)..(2580174): a, c, g or t
  modified_base (2580178)..(2580220): a, c, g or t
  modified_base (2580319)..(2580356): a, c, g or t
  modified_base (2580380)..(2580422): a, c, g or t
  modified_base (2580460)..(2580460): a, c, g or t
  modified_base (2580559)..(2580598): a, c, g or t
  modified_base (2580703)..(2580706): a, c, g or t
  modified_base (2580751)..(2580793): a, c, g or t
  modified_base (2580838)..(2580838): a, c, g or t
  modified_base (2581117)..(2581156): a, c, g or t
  modified_base (2581246)..(2581287): a, c, g or t
  modified_base (2581947)..(2581953): a, c, g or t
  modified_base (2582276)..(2582277): a, c, g or t
  modified_base (2582287)..(2582288): a, c, g or t
  modified_base (2583843)..(2583844): a, c, g or t
  modified_base (2583846)..(2583848): a, c, g or t
  modified_base (2583914)..(2583915): a, c, g or t
  modified_base (2583917)..(2583919): a, c, g or t
  modified_base (2583921)..(2583924): a, c, g or t
  modified_base (2583956)..(2583957): a, c, g or t
  modified_base (2583963)..(2583971): a, c, g or t
  modified_base (2584038)..(2584059): a, c, g or t
  modified_base (2584061)..(2584064): a, c, g or t
  modified_base (2584083)..(2584134): a, c, g or t
  modified_base (2584164)..(2584167): a, c, g or t
  modified_base (2584231)..(2584232): a, c, g or t
  modified_base (2584236)..(2584237): a, c, g or t
  modified_base (2584239)..(2584240): a, c, g or t
  modified_base (2584271)..(2584288): a, c, g or t
  modified_base (2584330)..(2584343): a, c, g or t
  modified_base (2584366)..(2584399): a, c, g or t
  modified_base (2584420)..(2584421): a, c, g or t
  modified_base (2584423)..(2584426): a, c, g or t
  modified_base (2584429)..(2584429): a, c, g or t
  modified_base (2584445)..(2584446): a, c, g or t
  modified_base (2584450)..(2585393): a, c, g or t
  modified_base (2585398)..(2585400): a, c, g or t
  modified_base (2585409)..(2585410): a, c, g or t
  modified_base (2585417)..(2585463): a, c, g or t
  modified_base (2585465)..(2585466): a, c, g or t
  modified_base (2585487)..(2585859): a, c, g or t
  modified_base (2585868)..(2585869): a, c, g or t
  modified_base (2585871)..(2585872): a, c, g or t
  modified_base (2585883)..(2586004): a, c, g or t
  modified_base (2586025)..(2586026): a, c, g or t
  modified_base (2586028)..(2586036): a, c, g or t
  modified_base (2586060)..(2586096): a, c, g or t
  modified_base (2586098)..(2586099): a, c, g or t
  modified_base (2586114)..(2586115): a, c, g or t
  modified_base (2586120)..(2586153): a, c, g or t
  modified_base (2586207)..(2586223): a, c, g or t
  modified_base (2586227)..(2586228): a, c, g or t
  modified_base (2586230)..(2586231): a, c, g or t
  modified_base (2586236)..(2586237): a, c, g or t
  modified_base (2586245)..(2586248): a, c, g or t
  modified_base (2586272)..(2586497): a, c, g or t
  modified_base (2586511)..(2586512): a, c, g or t
  modified_base (2586521)..(2586647): a, c, g or t
  modified_base (2586671)..(2586738): a, c, g or t
  modified_base (2586740)..(2586741): a, c, g or t
  modified_base (2586761)..(2587455): a, c, g or t
  modified_base (2587479)..(2587864): a, c, g or t
  modified_base (2587866)..(2587867): a, c, g or t
  modified_base (2587888)..(2588080): a, c, g or t
  modified_base (2588082)..(2588083): a, c, g or t
  modified_base (2588085)..(2588085): a, c, g or t
  modified_base (2588104)..(2588147): a, c, g or t
  modified_base (2588171)..(2588342): a, c, g or t
  modified_base (2588351)..(2588354): a, c, g or t
  modified_base (2588366)..(2588397): a, c, g or t
  modified_base (2588402)..(2588402): a, c, g or t
  modified_base (2588421)..(2588485): a, c, g or t
  modified_base (2588514)..(2588518): a, c, g or t
  modified_base (2588523)..(2588524): a, c, g or t
  modified_base (2588545)..(2588545): a, c, g or t
  modified_base (2588547)..(2588548): a, c, g or t
  modified_base (2588552)..(2588555): a, c, g or t
  modified_base (2588557)..(2588570): a, c, g or t
  modified_base (2588603)..(2588609): a, c, g or t
  modified_base (2588611)..(2588612): a, c, g or t
  modified_base (2588615)..(2588616): a, c, g or t
  modified_base (2588643)..(2588697): a, c, g or t
  modified_base (2588755)..(2588755): a, c, g or t
  modified_base (2588802)..(2588842): a, c, g or t
  modified_base (2588949)..(2588952): a, c, g or t
  modified_base (2589014)..(2589053): a, c, g or t
  modified_base (2589098)..(2589098): a, c, g or t
  modified_base (2589107)..(2589107): a, c, g or t
  modified_base (2589133)..(2589134): a, c, g or t
  modified_base (2589136)..(2589175): a, c, g or t
  modified_base (2589824)..(2589832): a, c, g or t
  modified_base (2590717)..(2590717): a, c, g or t
  modified_base (2591269)..(2591269): a, c, g or t
  modified_base (2591496)..(2591498): a, c, g or t
  modified_base (2591858)..(2591862): a, c, g or t
  modified_base (2592266)..(2592266): a, c, g or t
  modified_base (2595465)..(2595465): a, c, g or t
  modified_base (2595887)..(2595887): a, c, g or t
  modified_base (2596133)..(2596136): a, c, g or t
  modified_base (2597686)..(2597686): a, c, g or t
  modified_base (2600297)..(2600300): a, c, g or t
  modified_base (2600698)..(2600698): a, c, g or t
  modified_base (2601344)..(2601347): a, c, g or t
  modified_base (2602650)..(2602650): a, c, g or t
  modified_base (2603784)..(2603784): a, c, g or t
  modified_base (2604546)..(2604546): a, c, g or t
  modified_base (2604621)..(2604621): a, c, g or t
  modified_base (2604735)..(2604735): a, c, g or t
  modified_base (2605398)..(2605398): a, c, g or t
  modified_base (2605651)..(2605651): a, c, g or t
  modified_base (2606680)..(2606680): a, c, g or t
  modified_base (2607538)..(2607538): a, c, g or t
  modified_base (2607545)..(2607545): a, c, g or t
  modified_base (2607887)..(2607887): a, c, g or t
  modified_base (2608235)..(2608238): a, c, g or t
  modified_base (2612712)..(2612712): a, c, g or t
  modified_base (2615293)..(2615293): a, c, g or t
  modified_base (2615874)..(2615874): a, c, g or t
  modified_base (2616178)..(2616178): a, c, g or t
  modified_base (2616264)..(2616271): a, c, g or t
  modified_base (2616937)..(2616937): a, c, g or t
  modified_base (2619084)..(2619084): a, c, g or t
  modified_base (2620102)..(2620102): a, c, g or t
  modified_base (2620104)..(2620105): a, c, g or t
  modified_base (2620125)..(2620126): a, c, g or t
  modified_base (2620313)..(2620313): a, c, g or t
  modified_base (2620998)..(2620998): a, c, g or t
  modified_base (2621461)..(2621461): a, c, g or t
  modified_base (2622781)..(2622784): a, c, g or t
  modified_base (2623968)..(2623971): a, c, g or t
  modified_base (2624056)..(2624060): a, c, g or t
  modified_base (2624064)..(2624064): a, c, g or t
  modified_base (2625919)..(2625927): a, c, g or t
  modified_base (2627617)..(2627617): a, c, g or t
  modified_base (2628955)..(2628955): a, c, g or t
  modified_base (2631808)..(2631808): a, c, g or t
  modified_base (2634102)..(2634108): a, c, g or t
  modified_base (2634126)..(2634126): a, c, g or t
  modified_base (2634475)..(2634475): a, c, g or t
  modified_base (2634996)..(2634996): a, c, g or t
  modified_base (2635588)..(2635588): a, c, g or t
  modified_base (2635685)..(2635685): a, c, g or t
  modified_base (2638818)..(2638818): a, c, g or t
  modified_base (2641438)..(2641439): a, c, g or t
  modified_base (2641442)..(2641442): a, c, g or t
  modified_base (2641693)..(2641693): a, c, g or t
  modified_base (2641700)..(2641701): a, c, g or t
  modified_base (2646238)..(2646238): a, c, g or t
  modified_base (2653096)..(2653096): a, c, g or t
  modified_base (2653412)..(2653415): a, c, g or t
  modified_base (2654095)..(2654100): a, c, g or t
  modified_base (2655196)..(2655196): a, c, g or t
  modified_base (2657335)..(2657335): a, c, g or t
  modified_base (2658189)..(2658189): a, c, g or t
  modified_base (2658679)..(2658679): a, c, g or t
  modified_base (2660753)..(2660753): a, c, g or t
  modified_base (2660845)..(2660845): a, c, g or t
  modified_base (2662287)..(2662287): a, c, g or t
  modified_base (2663867)..(2663867): a, c, g or t
  modified_base (2665769)..(2665770): a, c, g or t
  modified_base (2666365)..(2666365): a, c, g or t
  modified_base (2667092)..(2667095): a, c, g or t
  modified_base (2669279)..(2669279): a, c, g or t
  modified_base (2671111)..(2671111): a, c, g or t
  modified_base (2672465)..(2672468): a, c, g or t
  modified_base (2673824)..(2673824): a, c, g or t
  modified_base (2674550)..(2674553): a, c, g or t
  modified_base (2675028)..(2675034): a, c, g or t
  modified_base (2677550)..(2677550): a, c, g or t
  modified_base (2677807)..(2677807): a, c, g or t
  modified_base (2678761)..(2678761): a, c, g or t
  modified_base (2679936)..(2679936): a, c, g or t
  modified_base (2680399)..(2680399): a, c, g or t
  modified_base (2680448)..(2680448): a, c, g or t
  modified_base (2681185)..(2681185): a, c, g or t
  modified_base (2682659)..(2682666): a, c, g or t
  modified_base (2683174)..(2683174): a, c, g or t
  modified_base (2684221)..(2684221): a, c, g or t
  modified_base (2687017)..(2687017): a, c, g or t
  modified_base (2688299)..(2688302): a, c, g or t
  modified_base (2688304)..(2688305): a, c, g or t
  modified_base (2688407)..(2688407): a, c, g or t
  modified_base (2694913)..(2694916): a, c, g or t
  modified_base (2696249)..(2696249): a, c, g or t
  modified_base (2696633)..(2696638): a, c, g or t
  modified_base (2698225)..(2698225): a, c, g or t
  modified_base (2699078)..(2699078): a, c, g or t
  modified_base (2700464)..(2700464): a, c, g or t
  modified_base (2702574)..(2702574): a, c, g or t
  modified_base (2702781)..(2702781): a, c, g or t
  modified_base (2703230)..(2703230): a, c, g or t
  modified_base (2703499)..(2703499): a, c, g or t
  modified_base (2703769)..(2703769): a, c, g or t
  modified_base (2704716)..(2704717): a, c, g or t
  modified_base (2704727)..(2704732): a, c, g or t
  modified_base (2705434)..(2705439): a, c, g or t
  modified_base (2706235)..(2706235): a, c, g or t
  modified_base (2706255)..(2706255): a, c, g or t
  modified_base (2708264)..(2708269): a, c, g or t
  modified_base (2708440)..(2708440): a, c, g or t
  modified_base (2709083)..(2709083): a, c, g or t
  modified_base (2709713)..(2709713): a, c, g or t
  modified_base (2710868)..(2710868): a, c, g or t
  modified_base (2711820)..(2711823): a, c, g or t
  modified_base (2712885)..(2712885): a, c, g or t
  modified_base (2713039)..(2713039): a, c, g or t
  modified_base (2713109)..(2713109): a, c, g or t
  modified_base (2713877)..(2713877): a, c, g or t
  modified_base (2716801)..(2716801): a, c, g or t
  modified_base (2717060)..(2717060): a, c, g or t
  modified_base (2717089)..(2717089): a, c, g or t
  modified_base (2722378)..(2722380): a, c, g or t
  modified_base (2722382)..(2722384): a, c, g or t
  modified_base (2726426)..(2726431): a, c, g or t
  modified_base (2726522)..(2726530): a, c, g or t
  modified_base (2726812)..(2726812): a, c, g or t
  modified_base (2729726)..(2729726): a, c, g or t
  modified_base (2730828)..(2730828): a, c, g or t
  modified_base (2731400)..(2731400): a, c, g or t
  modified_base (2731404)..(2731405): a, c, g or t
  modified_base (2731780)..(2731780): a, c, g or t
  modified_base (2732206)..(2732214): a, c, g or t
  modified_base (2732396)..(2732399): a, c, g or t
  modified_base (2734412)..(2734412): a, c, g or t
  modified_base (2734445)..(2734445): a, c, g or t
  modified_base (2736492)..(2736492): a, c, g or t
  modified_base (2742150)..(2742150): a, c, g or t
  modified_base (2743416)..(2743417): a, c, g or t
  modified_base (2743453)..(2743461): a, c, g or t
  modified_base (2744118)..(2744118): a, c, g or t
  modified_base (2744224)..(2744224): a, c, g or t
  modified_base (2746051)..(2746051): a, c, g or t
  modified_base (2748517)..(2748517): a, c, g or t
  modified_base (2751669)..(2751669): a, c, g or t
  modified_base (2752653)..(2752653): a, c, g or t
  modified_base (2753603)..(2753603): a, c, g or t
  modified_base (2754306)..(2754306): a, c, g or t
  modified_base (2754441)..(2754441): a, c, g or t
  modified_base (2754732)..(2754735): a, c, g or t
  modified_base (2755397)..(2755397): a, c, g or t
  modified_base (2755796)..(2755796): a, c, g or t
  modified_base (2755838)..(2755838): a, c, g or t
  modified_base (2755898)..(2755898): a, c, g or t
  modified_base (2756067)..(2756067): a, c, g or t
  modified_base (2756070)..(2756070): a, c, g or t
  modified_base (2757202)..(2757202): a, c, g or t
  modified_base (2757258)..(2757258): a, c, g or t
  modified_base (2758260)..(2758260): a, c, g or t
  modified_base (2759762)..(2759769): a, c, g or t
  modified_base (2760370)..(2760370): a, c, g or t
  modified_base (2762701)..(2762701): a, c, g or t
  modified_base (2763400)..(2763400): a, c, g or t
  modified_base (2763756)..(2763756): a, c, g or t
  modified_base (2765927)..(2765927): a, c, g or t
  modified_base (2772324)..(2772324): a, c, g or t
  modified_base (2772328)..(2772330): a, c, g or t
  modified_base (2773642)..(2773642): a, c, g or t
  modified_base (2774083)..(2774083): a, c, g or t
  modified_base (2775077)..(2775077): a, c, g or t
  modified_base (2775080)..(2775080): a, c, g or t
  modified_base (2775609)..(2775609): a, c, g or t
  modified_base (2776064)..(2776067): a, c, g or t
  modified_base (2777691)..(2777691): a, c, g or t
  modified_base (2778192)..(2778192): a, c, g or t
  modified_base (2778936)..(2778936): a, c, g or t
  modified_base (2782999)..(2782999): a, c, g or t
  modified_base (2783491)..(2783491): a, c, g or t
  modified_base (2784049)..(2784049): a, c, g or t
  modified_base (2786184)..(2786184): a, c, g or t
  modified_base (2787283)..(2787283): a, c, g or t
  modified_base (2787285)..(2787285): a, c, g or t
  modified_base (2789274)..(2789274): a, c, g or t
  modified_base (2791452)..(2791452): a, c, g or t
  modified_base (2792787)..(2792787): a, c, g or t
  modified_base (2794972)..(2794972): a, c, g or t
  modified_base (2797100)..(2797100): a, c, g or t
  modified_base (2798129)..(2798129): a, c, g or t
  modified_base (2798149)..(2798149): a, c, g or t
  modified_base (2798204)..(2798204): a, c, g or t
  modified_base (2798446)..(2798446): a, c, g or t
  modified_base (2799861)..(2799861): a, c, g or t
  modified_base (2804375)..(2804380): a, c, g or t
  modified_base (2804382)..(2804383): a, c, g or t
  modified_base (2804388)..(2804389): a, c, g or t
  modified_base (2804406)..(2804406): a, c, g or t
  modified_base (2804410)..(2804415): a, c, g or t
  modified_base (2804466)..(2804478): a, c, g or t
  modified_base (2804488)..(2804491): a, c, g or t
  modified_base (2804503)..(2804504): a, c, g or t
  modified_base (2804517)..(2804574): a, c, g or t
  modified_base (2804576)..(2804576): a, c, g or t
  modified_base (2804661)..(2804665): a, c, g or t
  modified_base (2804672)..(2804673): a, c, g or t
  modified_base (2804676)..(2804677): a, c, g or t
  modified_base (2805020)..(2805020): a, c, g or t
  modified_base (2805950)..(2805950): a, c, g or t
  modified_base (2806135)..(2806142): a, c, g or t
  modified_base (2807875)..(2807882): a, c, g or t
  modified_base (2807886)..(2807886): a, c, g or t
  modified_base (2809471)..(2809471): a, c, g or t
  modified_base (2809905)..(2809905): a, c, g or t
  modified_base (2810399)..(2810399): a, c, g or t
  modified_base (2810985)..(2810985): a, c, g or t
  modified_base (2813645)..(2813645): a, c, g or t
  modified_base (2813809)..(2813809): a, c, g or t
  modified_base (2814445)..(2814445): a, c, g or t
  modified_base (2815006)..(2815006): a, c, g or t
  modified_base (2815025)..(2815033): a, c, g or t
  modified_base (2815035)..(2815036): a, c, g or t
  modified_base (2819401)..(2819401): a, c, g or t
  modified_base (2820034)..(2820034): a, c, g or t
  modified_base (2820210)..(2820210): a, c, g or t
  modified_base (2820684)..(2820685): a, c, g or t
  modified_base (2820825)..(2820825): a, c, g or t
  modified_base (2822462)..(2822462): a, c, g or t
  modified_base (2822961)..(2822961): a, c, g or t
  modified_base (2826201)..(2826201): a, c, g or t
  modified_base (2826865)..(2826869): a, c, g or t
  modified_base (2826879)..(2826879): a, c, g or t
  modified_base (2827136)..(2827136): a, c, g or t
  modified_base (2828268)..(2828268): a, c, g or t
  modified_base (2828867)..(2828867): a, c, g or t
  modified_base (2833078)..(2833078): a, c, g or t
  modified_base (2833513)..(2833513): a, c, g or t
  modified_base (2836821)..(2836823): a, c, g or t
  modified_base (2839300)..(2839300): a, c, g or t
  modified_base (2840544)..(2840545): a, c, g or t
  modified_base (2842198)..(2842200): a, c, g or t
  modified_base (2844250)..(2844250): a, c, g or t
  modified_base (2847565)..(2847570): a, c, g or t
  modified_base (2850212)..(2850212): a, c, g or t
  modified_base (2851535)..(2851539): a, c, g or t
  modified_base (2851541)..(2851541): a, c, g or t
  modified_base (2851570)..(2851575): a, c, g or t
  modified_base (2851798)..(2851798): a, c, g or t
  modified_base (2851803)..(2851806): a, c, g or t
  modified_base (2851809)..(2851812): a, c, g or t
  modified_base (2852153)..(2852153): a, c, g or t
  modified_base (2853965)..(2853971): a, c, g or t
  modified_base (2853974)..(2853974): a, c, g or t
  modified_base (2854621)..(2854621): a, c, g or t
  modified_base (2857271)..(2857271): a, c, g or t
  modified_base (2857294)..(2857294): a, c, g or t
  modified_base (2857553)..(2857553): a, c, g or t
  modified_base (2859305)..(2859305): a, c, g or t
  modified_base (2859310)..(2859310): a, c, g or t
  modified_base (2859312)..(2859312): a, c, g or t
  modified_base (2859328)..(2859336): a, c, g or t
  modified_base (2859576)..(2859576): a, c, g or t
  modified_base (2859578)..(2859579): a, c, g or t
  modified_base (2860422)..(2860422): a, c, g or t
  modified_base (2861302)..(2861302): a, c, g or t
  modified_base (2863773)..(2863776): a, c, g or t
  modified_base (2864868)..(2864868): a, c, g or t
  modified_base (2866097)..(2866106): a, c, g or t
  modified_base (2866888)..(2866889): a, c, g or t
  modified_base (2866891)..(2866894): a, c, g or t
  modified_base (2867399)..(2867400): a, c, g or t
  modified_base (2867541)..(2867544): a, c, g or t
  modified_base (2867640)..(2867640): a, c, g or t
  modified_base (2867897)..(2867897): a, c, g or t
  modified_base (2869084)..(2869084): a, c, g or t
  modified_base (2869515)..(2869515): a, c, g or t
  modified_base (2869557)..(2869557): a, c, g or t
  modified_base (2869559)..(2869562): a, c, g or t
  modified_base (2870943)..(2870949): a, c, g or t
  modified_base (2871053)..(2871053): a, c, g or t
  modified_base (2873884)..(2873884): a, c, g or t
  modified_base (2873893)..(2873893): a, c, g or t
  modified_base (2873901)..(2873901): a, c, g or t
  modified_base (2874892)..(2874892): a, c, g or t
  modified_base (2876699)..(2876699): a, c, g or t
  modified_base (2876935)..(2876935): a, c, g or t
  modified_base (2878240)..(2878240): a, c, g or t
  modified_base (2880484)..(2880487): a, c, g or t
  modified_base (2880731)..(2880733): a, c, g or t
  modified_base (2883312)..(2883312): a, c, g or t
  modified_base (2883988)..(2883988): a, c, g or t
  modified_base (2887118)..(2887118): a, c, g or t
  modified_base (2887120)..(2887120): a, c, g or t
  modified_base (2889782)..(2889782): a, c, g or t
  modified_base (2890479)..(2890479): a, c, g or t
  modified_base (2892610)..(2892616): a, c, g or t
  modified_base (2893435)..(2893435): a, c, g or t
  modified_base (2893589)..(2893589): a, c, g or t
  modified_base (2894266)..(2894266): a, c, g or t
  modified_base (2896564)..(2896564): a, c, g or t
  modified_base (2896828)..(2896829): a, c, g or t
  modified_base (2896922)..(2896955): a, c, g or t
  modified_base (2897076)..(2897077): a, c, g or t
  modified_base (2900124)..(2900124): a, c, g or t
  modified_base (2900958)..(2900958): a, c, g or t
  modified_base (2901057)..(2901057): a, c, g or t
  modified_base (2901059)..(2901059): a, c, g or t
  modified_base (2901061)..(2901061): a, c, g or t
  modified_base (2901063)..(2901063): a, c, g or t
  modified_base (2902092)..(2902092): a, c, g or t
  modified_base (2902176)..(2902176): a, c, g or t
  modified_base (2902277)..(2902277): a, c, g or t
  modified_base (2902698)..(2902698): a, c, g or t
  modified_base (2903115)..(2903115): a, c, g or t
  modified_base (2906012)..(2906012): a, c, g or t
  modified_base (2906186)..(2906186): a, c, g or t
  modified_base (2908061)..(2908061): a, c, g or t
  modified_base (2908064)..(2908065): a, c, g or t
  modified_base (2908172)..(2908176): a, c, g or t
  modified_base (2908599)..(2908599): a, c, g or t
  modified_base (2909763)..(2909763): a, c, g or t
  modified_base (2911931)..(2911931): a, c, g or t
  modified_base (2912534)..(2912534): a, c, g or t
  modified_base (2913325)..(2913325): a, c, g or t
  modified_base (2916701)..(2916701): a, c, g or t
  modified_base (2917943)..(2917950): a, c, g or t
  modified_base (2920731)..(2920731): a, c, g or t
  modified_base (2922942)..(2922942): a, c, g or t
  modified_base (2923759)..(2923762): a, c, g or t
  modified_base (2924303)..(2924303): a, c, g or t
  modified_base (2927446)..(2927446): a, c, g or t
  modified_base (2927452)..(2927452): a, c, g or t
  modified_base (2929577)..(2929580): a, c, g or t
  modified_base (2931376)..(2931376): a, c, g or t
  modified_base (2931384)..(2931387): a, c, g or t
  modified_base (2931697)..(2931697): a, c, g or t
  modified_base (2934773)..(2934776): a, c, g or t
  modified_base (2934778)..(2934783): a, c, g or t
  modified_base (2936438)..(2936447): a, c, g or t
  modified_base (2936481)..(2936494): a, c, g or t
  modified_base (2938390)..(2938390): a, c, g or t
  modified_base (2940912)..(2940913): a, c, g or t
  modified_base (2941122)..(2941122): a, c, g or t
  modified_base (2941278)..(2941278): a, c, g or t
  modified_base (2941280)..(2941280): a, c, g or t
  modified_base (2943148)..(2943150): a, c, g or t
  modified_base (2943407)..(2943407): a, c, g or t
  modified_base (2943467)..(2943467): a, c, g or t
  modified_base (2947421)..(2947421): a, c, g or t
  modified_base (2949192)..(2949197): a, c, g or t
  modified_base (2950518)..(2950518): a, c, g or t
  modified_base (2951824)..(2951826): a, c, g or t
  modified_base (2951828)..(2951830): a, c, g or t
  modified_base (2952784)..(2952784): a, c, g or t
  modified_base (2954892)..(2954892): a, c, g or t
  modified_base (2955921)..(2955926): a, c, g or t
  modified_base (2956019)..(2956019): a, c, g or t
  modified_base (2956217)..(2956217): a, c, g or t
  modified_base (2957560)..(2957560): a, c, g or t
  modified_base (2957562)..(2957562): a, c, g or t
  modified_base (2958589)..(2958589): a, c, g or t
  modified_base (2961322)..(2961322): a, c, g or t
  modified_base (2961425)..(2961425): a, c, g or t
  modified_base (2962535)..(2962535): a, c, g or t
  modified_base (2963131)..(2963131): a, c, g or t
  modified_base (2965538)..(2965538): a, c, g or t
  modified_base (2965586)..(2965586): a, c, g or t
  modified_base (2965591)..(2965591): a, c, g or t
  modified_base (2966850)..(2966850): a, c, g or t
  modified_base (2966861)..(2966861): a, c, g or t
  modified_base (2967358)..(2967366): a, c, g or t
  modified_base (2967550)..(2967553): a, c, g or t
  modified_base (2969786)..(2969786): a, c, g or t
  modified_base (2970400)..(2970400): a, c, g or t
  modified_base (2971631)..(2971631): a, c, g or t
  modified_base (2971787)..(2971787): a, c, g or t
  modified_base (2973985)..(2973988): a, c, g or t
  modified_base (2974759)..(2974759): a, c, g or t
  modified_base (2976955)..(2976961): a, c, g or t
  modified_base (2977322)..(2977322): a, c, g or t
  modified_base (2977324)..(2977331): a, c, g or t
  modified_base (2978393)..(2978393): a, c, g or t
  modified_base (2978739)..(2978739): a, c, g or t
  modified_base (2979728)..(2979728): a, c, g or t
  modified_base (2981696)..(2981697): a, c, g or t
  modified_base (2982235)..(2982235): a, c, g or t
  modified_base (2983665)..(2983672): a, c, g or t
  modified_base (2984361)..(2984361): a, c, g or t
  modified_base (2985182)..(2985182): a, c, g or t
  modified_base (2985227)..(2985227): a, c, g or t
  modified_base (2985606)..(2985606): a, c, g or t
  modified_base (2986011)..(2986011): a, c, g or t
  modified_base (2987928)..(2987929): a, c, g or t
  modified_base (2988493)..(2988493): a, c, g or t
  modified_base (2989000)..(2989000): a, c, g or t
  modified_base (2993134)..(2993144): a, c, g or t
  modified_base (2993150)..(2993151): a, c, g or t
  modified_base (2995005)..(2995005): a, c, g or t
  modified_base (2995525)..(2995525): a, c, g or t
  modified_base (2995604)..(2995609): a, c, g or t
  modified_base (2995729)..(2995729): a, c, g or t
  modified_base (2995738)..(2995738): a, c, g or t
  modified_base (2997560)..(2997561): a, c, g or t
  modified_base (2997665)..(2997665): a, c, g or t
  modified_base (2997950)..(2997950): a, c, g or t
  modified_base (2997970)..(2997970): a, c, g or t
  modified_base (2998018)..(2998018): a, c, g or t
  modified_base (2999073)..(2999073): a, c, g or t
  modified_base (2999197)..(2999197): a, c, g or t
  modified_base (3002588)..(3002588): a, c, g or t
  modified_base (3004605)..(3004607): a, c, g or t
  modified_base (3004611)..(3004611): a, c, g or t
  modified_base (3005789)..(3005789): a, c, g or t
  modified_base (3005840)..(3005840): a, c, g or t
  modified_base (3006974)..(3006974): a, c, g or t
  modified_base (3006980)..(3006980): a, c, g or t
  modified_base (3006982)..(3006982): a, c, g or t
  modified_base (3008426)..(3008426): a, c, g or t
  modified_base (3010351)..(3010351): a, c, g or t
  modified_base (3012303)..(3012303): a, c, g or t
  modified_base (3012625)..(3012625): a, c, g or t
  modified_base (3013576)..(3013576): a, c, g or t
  modified_base (3013758)..(3013758): a, c, g or t
  modified_base (3013760)..(3013760): a, c, g or t
  modified_base (3013832)..(3013832): a, c, g or t
  modified_base (3014341)..(3014341): a, c, g or t
  modified_base (3015176)..(3015176): a, c, g or t
  modified_base (3019425)..(3019428): a, c, g or t
  modified_base (3021281)..(3021281): a, c, g or t
  modified_base (3021656)..(3021656): a, c, g or t
  modified_base (3024296)..(3024296): a, c, g or t
  modified_base (3026236)..(3026236): a, c, g or t
  modified_base (3026381)..(3026382): a, c, g or t
  modified_base (3026384)..(3026386): a, c, g or t
  modified_base (3026931)..(3026931): a, c, g or t
  modified_base (3026951)..(3026951): a, c, g or t
  modified_base (3027001)..(3027001): a, c, g or t
  modified_base (3028080)..(3028085): a, c, g or t
  modified_base (3028278)..(3028278): a, c, g or t
  modified_base (3032344)..(3032347): a, c, g or t
  modified_base (3034396)..(3034396): a, c, g or t
  modified_base (3035165)..(3035165): a, c, g or t
  modified_base (3035787)..(3035787): a, c, g or t
  modified_base (3038571)..(3038571): a, c, g or t
  modified_base (3046629)..(3046629): a, c, g or t
  modified_base (3046848)..(3046848): a, c, g or t
  modified_base (3046874)..(3046874): a, c, g or t
  modified_base (3046914)..(3046914): a, c, g or t
  modified_base (3049911)..(3049911): a, c, g or t
  modified_base (3049949)..(3049949): a, c, g or t
  modified_base (3054948)..(3054948): a, c, g or t
  modified_base (3059621)..(3059621): a, c, g or t
  modified_base (3062696)..(3062696): a, c, g or t
  modified_base (3068401)..(3068401): a, c, g or t
  modified_base (3069135)..(3069138): a, c, g or t
  modified_base (3069363)..(3069367): a, c, g or t
  modified_base (3069384)..(3069384): a, c, g or t
  modified_base (3070974)..(3070974): a, c, g or t
  modified_base (3071583)..(3071583): a, c, g or t
  modified_base (3077370)..(3077370): a, c, g or t
  modified_base (3078727)..(3078727): a, c, g or t
  modified_base (3080892)..(3080892): a, c, g or t
  modified_base (3081045)..(3081045): a, c, g or t
  modified_base (3081501)..(3081506): a, c, g or t
  modified_base (3083793)..(3083793): a, c, g or t
  modified_base (3083865)..(3083865): a, c, g or t
  modified_base (3084249)..(3084249): a, c, g or t
  modified_base (3085386)..(3085389): a, c, g or t
  modified_base (3085420)..(3085420): a, c, g or t
  modified_base (3085576)..(3085576): a, c, g or t
  modified_base (3085616)..(3085621): a, c, g or t
  modified_base (3091741)..(3091744): a, c, g or t
  modified_base (3091747)..(3091748): a, c, g or t
  modified_base (3091750)..(3091759): a, c, g or t
  modified_base (3092138)..(3092138): a, c, g or t
  modified_base (3092185)..(3092185): a, c, g or t
  modified_base (3092203)..(3092203): a, c, g or t
  modified_base (3092207)..(3092207): a, c, g or t
  modified_base (3095006)..(3095009): a, c, g or t
  modified_base (3095343)..(3095348): a, c, g or t
  modified_base (3095464)..(3095464): a, c, g or t
  modified_base (3095473)..(3095473): a, c, g or t
  modified_base (3096046)..(3096046): a, c, g or t
  modified_base (3096132)..(3096178): a, c, g or t
  modified_base (3096184)..(3096184): a, c, g or t
  modified_base (3096351)..(3096351): a, c, g or t
  modified_base (3096392)..(3096393): a, c, g or t
  modified_base (3096397)..(3096436): a, c, g or t
  modified_base (3096590)..(3096629): a, c, g or t
  modified_base (3096693)..(3096697): a, c, g or t
  modified_base (3096701)..(3096701): a, c, g or t
  modified_base (3096710)..(3096710): a, c, g or t
  modified_base (3096766)..(3096771): a, c, g or t
  modified_base (3096773)..(3096774): a, c, g or t
  modified_base (3096798)..(3096799): a, c, g or t
  modified_base (3096822)..(3096822): a, c, g or t
  modified_base (3096847)..(3096856): a, c, g or t
  modified_base (3096955)..(3096956): a, c, g or t
  modified_base (3096982)..(3096983): a, c, g or t
  modified_base (3097095)..(3097096): a, c, g or t
  modified_base (3097227)..(3097227): a, c, g or t
  modified_base (3097335)..(3097335): a, c, g or t
  modified_base (3097625)..(3097626): a, c, g or t
  modified_base (3097628)..(3097631): a, c, g or t
  modified_base (3097638)..(3097640): a, c, g or t
  modified_base (3097642)..(3097649): a, c, g or t
  modified_base (3097784)..(3097798): a, c, g or t
  modified_base (3097883)..(3097887): a, c, g or t
  modified_base (3097951)..(3097954): a, c, g or t
  modified_base (3098057)..(3098061): a, c, g or t
  modified_base (3098190)..(3098192): a, c, g or t
  modified_base (3098255)..(3098255): a, c, g or t
  modified_base (3098562)..(3098562): a, c, g or t
  modified_base (3098671)..(3098675): a, c, g or t
  modified_base (3099523)..(3099523): a, c, g or t
  modified_base (3103164)..(3103164): a, c, g or t
  modified_base (3103629)..(3103629): a, c, g or t
  modified_base (3104044)..(3104047): a, c, g or t
  modified_base (3105211)..(3105212): a, c, g or t
  modified_base (3105216)..(3105219): a, c, g or t
  modified_base (3105285)..(3105288): a, c, g or t
  modified_base (3105321)..(3105321): a, c, g or t
  modified_base (3105602)..(3105602): a, c, g or t
  modified_base (3105648)..(3105651): a, c, g or t
  modified_base (3105663)..(3105663): a, c, g or t
  modified_base (3105696)..(3105696): a, c, g or t
  modified_base (3105960)..(3105960): a, c, g or t
  modified_base (3106729)..(3106729): a, c, g or t
  modified_base (3110993)..(3110993): a, c, g or t
  modified_base (3112677)..(3112681): a, c, g or t
  modified_base (3116993)..(3116993): a, c, g or t
  modified_base (3120400)..(3120403): a, c, g or t
  modified_base (3120772)..(3120775): a, c, g or t
  modified_base (3122166)..(3122181): a, c, g or t
  modified_base (3122662)..(3122662): a, c, g or t
  modified_base (3123344)..(3123392): a, c, g or t
  modified_base (3123420)..(3123420): a, c, g or t
  modified_base (3123425)..(3123485): a, c, g or t
  modified_base (3123496)..(3123497): a, c, g or t
  modified_base (3123523)..(3123568): a, c, g or t
  modified_base (3123573)..(3123573): a, c, g or t
  modified_base (3123577)..(3123578): a, c, g or t
  modified_base (3123590)..(3123596): a, c, g or t
  modified_base (3123634)..(3123636): a, c, g or t
  modified_base (3123639)..(3123640): a, c, g or t
  modified_base (3123642)..(3123643): a, c, g or t
  modified_base (3123667)..(3123680): a, c, g or t
  modified_base (3123704)..(3123756): a, c, g or t
  modified_base (3123767)..(3123768): a, c, g or t
  modified_base (3123780)..(3123802): a, c, g or t
  modified_base (3123813)..(3123814): a, c, g or t
  modified_base (3123818)..(3123820): a, c, g or t
  modified_base (3123826)..(3123858): a, c, g or t
  modified_base (3123864)..(3123865): a, c, g or t
  modified_base (3123905)..(3123921): a, c, g or t
  modified_base (3123963)..(3123964): a, c, g or t
  modified_base (3123968)..(3124044): a, c, g or t
  modified_base (3124057)..(3124058): a, c, g or t
  modified_base (3124133)..(3124134): a, c, g or t
  modified_base (3124139)..(3124939): a, c, g or t
  modified_base (3124942)..(3124945): a, c, g or t
  modified_base (3124947)..(3124948): a, c, g or t
  modified_base (3124960)..(3125183): a, c, g or t
  modified_base (3125205)..(3125206): a, c, g or t
  modified_base (3125211)..(3125469): a, c, g or t
  modified_base (3125479)..(3125480): a, c, g or t
  modified_base (3125490)..(3125529): a, c, g or t
  modified_base (3125551)..(3125556): a, c, g or t
  modified_base (3125590)..(3125814): a, c, g or t
  modified_base (3125914)..(3125955): a, c, g or t
  modified_base (3126085)..(3126085): a, c, g or t
  modified_base (3126115)..(3126154): a, c, g or t
  modified_base (3126196)..(3126202): a, c, g or t
  modified_base (3126229)..(3126232): a, c, g or t
  modified_base (3126237)..(3126295): a, c, g or t
  modified_base (3126302)..(3126302): a, c, g or t
  modified_base (3126305)..(3126305): a, c, g or t
  modified_base (3126332)..(3126332): a, c, g or t
  modified_base (3126334)..(3126339): a, c, g or t
  modified_base (3126341)..(3126341): a, c, g or t
  modified_base (3126346)..(3126346): a, c, g or t
  modified_base (3126362)..(3126421): a, c, g or t
  modified_base (3126425)..(3126425): a, c, g or t
  modified_base (3126439)..(3126440): a, c, g or t
  modified_base (3126444)..(3127232): a, c, g or t
  modified_base (3127235)..(3127235): a, c, g or t
  modified_base (3127238)..(3127238): a, c, g or t
  modified_base (3127267)..(3127488): a, c, g or t
  modified_base (3127490)..(3127491): a, c, g or t
  modified_base (3127515)..(3127515): a, c, g or t
  modified_base (3127517)..(3127639): a, c, g or t
  modified_base (3127647)..(3127647): a, c, g or t
  modified_base (3127659)..(3127662): a, c, g or t
  modified_base (3127684)..(3127700): a, c, g or t
  modified_base (3127731)..(3127731): a, c, g or t
  modified_base (3127744)..(3127745): a, c, g or t
  modified_base (3127747)..(3127761): a, c, g or t
  modified_base (3127861)..(3127886): a, c, g or t
  modified_base (3127902)..(3127903): a, c, g or t
  modified_base (3127908)..(3127933): a, c, g or t
  modified_base (3127990)..(3128022): a, c, g or t
  modified_base (3128025)..(3128026): a, c, g or t
  modified_base (3128029)..(3128030): a, c, g or t
  modified_base (3128121)..(3128128): a, c, g or t
  modified_base (3128232)..(3128233): a, c, g or t
  modified_base (3128235)..(3128236): a, c, g or t
  modified_base (3128238)..(3128239): a, c, g or t
  modified_base (3128275)..(3128276): a, c, g or t
  modified_base (3128306)..(3128307): a, c, g or t
  modified_base (3128311)..(3128312): a, c, g or t
  modified_base (3128385)..(3128400): a, c, g or t
  modified_base (3128428)..(3128429): a, c, g or t
  modified_base (3128440)..(3128441): a, c, g or t
  modified_base (3128467)..(3128476): a, c, g or t
  modified_base (3128527)..(3128530): a, c, g or t
  modified_base (3128532)..(3128533): a, c, g or t
  modified_base (3128535)..(3128536): a, c, g or t
  modified_base (3128682)..(3128719): a, c, g or t
  modified_base (3128740)..(3128741): a, c, g or t
  modified_base (3128757)..(3128758): a, c, g or t
  modified_base (3128767)..(3128768): a, c, g or t
  modified_base (3128772)..(3128773): a, c, g or t
  modified_base (3128800)..(3128801): a, c, g or t
  modified_base (3128841)..(3128859): a, c, g or t
  modified_base (3128935)..(3128940): a, c, g or t
  modified_base (3128970)..(3128986): a, c, g or t
  modified_base (3129040)..(3129054): a, c, g or t
  modified_base (3129120)..(3129176): a, c, g or t
  modified_base (3129205)..(3129206): a, c, g or t
  modified_base (3129234)..(3129242): a, c, g or t
  modified_base (3129255)..(3129256): a, c, g or t
  modified_base (3129262)..(3129263): a, c, g or t
  modified_base (3129265)..(3129294): a, c, g or t
  modified_base (3129323)..(3129328): a, c, g or t
  modified_base (3129353)..(3129434): a, c, g or t
  modified_base (3129457)..(3129615): a, c, g or t
  modified_base (3129639)..(3129641): a, c, g or t
  modified_base (3129702)..(3129720): a, c, g or t
  modified_base (3129748)..(3129748): a, c, g or t
  modified_base (3129763)..(3129766): a, c, g or t
  modified_base (3129773)..(3129774): a, c, g or t
  modified_base (3129776)..(3129776): a, c, g or t
  modified_base (3129787)..(3129787): a, c, g or t
  modified_base (3129790)..(3129803): a, c, g or t
  modified_base (3129885)..(3129888): a, c, g or t
  modified_base (3129895)..(3129895): a, c, g or t
  modified_base (3129924)..(3129924): a, c, g or t
  modified_base (3129943)..(3129944): a, c, g or t
  modified_base (3129968)..(3129971): a, c, g or t
  modified_base (3129974)..(3129978): a, c, g or t
  modified_base (3129980)..(3129980): a, c, g or t
  modified_base (3130014)..(3130015): a, c, g or t
  modified_base (3130017)..(3130068): a, c, g or t
  modified_base (3130092)..(3130135): a, c, g or t
  modified_base (3130138)..(3130139): a, c, g or t
  modified_base (3130185)..(3130185): a, c, g or t
  modified_base (3130190)..(3130239): a, c, g or t
  modified_base (3130427)..(3130438): a, c, g or t
  modified_base (3130482)..(3130482): a, c, g or t
  modified_base (3130588)..(3130589): a, c, g or t
  modified_base (3130673)..(3130681): a, c, g or t
  modified_base (3130694)..(3130695): a, c, g or t
  modified_base (3130781)..(3130783): a, c, g or t
  modified_base (3130786)..(3130848): a, c, g or t
  modified_base (3131004)..(3131005): a, c, g or t
  modified_base (3131044)..(3131044): a, c, g or t
  modified_base (3131046)..(3131050): a, c, g or t
  modified_base (3131400)..(3131403): a, c, g or t
  modified_base (3131522)..(3131525): a, c, g or t
  modified_base (3131582)..(3131583): a, c, g or t
  modified_base (3131586)..(3131596): a, c, g or t
  modified_base (3131690)..(3131690): a, c, g or t
  modified_base (3131878)..(3131878): a, c, g or t
  modified_base (3131955)..(3131958): a, c, g or t
  modified_base (3131994)..(3132004): a, c, g or t
  modified_base (3132132)..(3132136): a, c, g or t
  modified_base (3132176)..(3132181): a, c, g or t
  modified_base (3132220)..(3132226): a, c, g or t
  modified_base (3132731)..(3132738): a, c, g or t
  modified_base (3133275)..(3133282): a, c, g or t
  modified_base (3133420)..(3133420): a, c, g or t
  modified_base (3133605)..(3133605): a, c, g or t
  modified_base (3133644)..(3133644): a, c, g or t
  modified_base (3133693)..(3133693): a, c, g or t
  modified_base (3133708)..(3133708): a, c, g or t
  modified_base (3134804)..(3134804): a, c, g or t
  modified_base (3136276)..(3136276): a, c, g or t
  modified_base (3136311)..(3136314): a, c, g or t
  modified_base (3137462)..(3137470): a, c, g or t
  modified_base (3140021)..(3140021): a, c, g or t
  modified_base (3140612)..(3140612): a, c, g or t
  modified_base (3140911)..(3140911): a, c, g or t
  modified_base (3140955)..(3140955): a, c, g or t
  modified_base (3141343)..(3141343): a, c, g or t
  modified_base (3141490)..(3141490): a, c, g or t
  modified_base (3142177)..(3142177): a, c, g or t
  modified_base (3142792)..(3142792): a, c, g or t
  modified_base (3143778)..(3143778): a, c, g or t
  modified_base (3144401)..(3144401): a, c, g or t
  modified_base (3146668)..(3146668): a, c, g or t
  modified_base (3146672)..(3146672): a, c, g or t
  modified_base (3147186)..(3147186): a, c, g or t
  modified_base (3147272)..(3147275): a, c, g or t
  modified_base (3148011)..(3148011): a, c, g or t
  modified_base (3148042)..(3148045): a, c, g or t
  modified_base (3149617)..(3149620): a, c, g or t
  modified_base (3149857)..(3149857): a, c, g or t
  modified_base (3150499)..(3150499): a, c, g or t
  modified_base (3150501)..(3150501): a, c, g or t
  modified_base (3150585)..(3150585): a, c, g or t
  modified_base (3150745)..(3150748): a, c, g or t
  modified_base (3151148)..(3151148): a, c, g or t
  modified_base (3151721)..(3151721): a, c, g or t
  modified_base (3151759)..(3151759): a, c, g or t
  modified_base (3151963)..(3151963): a, c, g or t
  modified_base (3153635)..(3153635): a, c, g or t
  modified_base (3153854)..(3153854): a, c, g or t
  modified_base (3153880)..(3153880): a, c, g or t
  modified_base (3154571)..(3154571): a, c, g or t
  modified_base (3155491)..(3155499): a, c, g or t
  modified_base (3156120)..(3156120): a, c, g or t
  modified_base (3156395)..(3156395): a, c, g or t
  modified_base (3157372)..(3157372): a, c, g or t
  modified_base (3157806)..(3157806): a, c, g or t
  modified_base (3157823)..(3157823): a, c, g or t
  modified_base (3157946)..(3157955): a, c, g or t
  modified_base (3158186)..(3158204): a, c, g or t
  modified_base (3160734)..(3160734): a, c, g or t
  modified_base (3161171)..(3161171): a, c, g or t
  modified_base (3161713)..(3161713): a, c, g or t
  modified_base (3161741)..(3161741): a, c, g or t
  modified_base (3162556)..(3162556): a, c, g or t
  modified_base (3162684)..(3162684): a, c, g or t
  modified_base (3164122)..(3164123): a, c, g or t
  modified_base (3169058)..(3169058): a, c, g or t
  modified_base (3170266)..(3170266): a, c, g or t
  modified_base (3170355)..(3170355): a, c, g or t
  modified_base (3170444)..(3170444): a, c, g or t
  modified_base (3170459)..(3170459): a, c, g or t
  modified_base (3170523)..(3170523): a, c, g or t
  modified_base (3172076)..(3172076): a, c, g or t
  modified_base (3173435)..(3173435): a, c, g or t
  modified_base (3173713)..(3173713): a, c, g or t
  modified_base (3173938)..(3173938): a, c, g or t
  modified_base (3176152)..(3176155): a, c, g or t
  modified_base (3176162)..(3176166): a, c, g or t
  modified_base (3176360)..(3176360): a, c, g or t
  modified_base (3176714)..(3176714): a, c, g or t
  modified_base (3177263)..(3177266): a, c, g or t
  modified_base (3177837)..(3177838): a, c, g or t
  modified_base (3177933)..(3177933): a, c, g or t
  modified_base (3178230)..(3178230): a, c, g or t
  modified_base (3181055)..(3181058): a, c, g or t
  modified_base (3181060)..(3181061): a, c, g or t
  modified_base (3181063)..(3181084): a, c, g or t
  modified_base (3181087)..(3181088): a, c, g or t
  modified_base (3181191)..(3181192): a, c, g or t
  modified_base (3181196)..(3181197): a, c, g or t
  modified_base (3181199)..(3181244): a, c, g or t
  modified_base (3181331)..(3181350): a, c, g or t
  modified_base (3181353)..(3181354): a, c, g or t
  modified_base (3185012)..(3185015): a, c, g or t
  modified_base (3185918)..(3185918): a, c, g or t
  modified_base (3186148)..(3186148): a, c, g or t
  modified_base (3186542)..(3186542): a, c, g or t
  modified_base (3187237)..(3187237): a, c, g or t
  modified_base (3188064)..(3188070): a, c, g or t
  modified_base (3188072)..(3188073): a, c, g or t
  modified_base (3188577)..(3188578): a, c, g or t
  modified_base (3188580)..(3188583): a, c, g or t
  modified_base (3188587)..(3188588): a, c, g or t
  modified_base (3188590)..(3188591): a, c, g or t
  modified_base (3190094)..(3190094): a, c, g or t
  modified_base (3190102)..(3190102): a, c, g or t
  modified_base (3190149)..(3190152): a, c, g or t
  modified_base (3192012)..(3192015): a, c, g or t
  modified_base (3192537)..(3192537): a, c, g or t
  modified_base (3192677)..(3192677): a, c, g or t
  modified_base (3193331)..(3193331): a, c, g or t
  modified_base (3197303)..(3197304): a, c, g or t
  modified_base (3198346)..(3198346): a, c, g or t
  modified_base (3198419)..(3198419): a, c, g or t
  modified_base (3199474)..(3199474): a, c, g or t
  modified_base (3200339)..(3200339): a, c, g or t
  modified_base (3200832)..(3200836): a, c, g or t
  modified_base (3201191)..(3201195): a, c, g or t
  modified_base (3201197)..(3201198): a, c, g or t
  modified_base (3201535)..(3201538): a, c, g or t
  modified_base (3202178)..(3202178): a, c, g or t
  modified_base (3205767)..(3205767): a, c, g or t
  modified_base (3205921)..(3205921): a, c, g or t
  modified_base (3207240)..(3207240): a, c, g or t
  modified_base (3207653)..(3207656): a, c, g or t
  modified_base (3208929)..(3208929): a, c, g or t
  modified_base (3209063)..(3209063): a, c, g or t
  modified_base (3209277)..(3209277): a, c, g or t
  modified_base (3210109)..(3210109): a, c, g or t
  modified_base (3210821)..(3210821): a, c, g or t
  modified_base (3211333)..(3211333): a, c, g or t
  modified_base (3213107)..(3213110): a, c, g or t
  modified_base (3213417)..(3213420): a, c, g or t
  modified_base (3213904)..(3213913): a, c, g or t
  modified_base (3214199)..(3214199): a, c, g or t
  modified_base (3214942)..(3214942): a, c, g or t
  modified_base (3216568)..(3216568): a, c, g or t
  modified_base (3217289)..(3217289): a, c, g or t
  modified_base (3218604)..(3218607): a, c, g or t
  modified_base (3218690)..(3218690): a, c, g or t
  modified_base (3220396)..(3220398): a, c, g or t
  modified_base (3220400)..(3220400): a, c, g or t
  modified_base (3221001)..(3221001): a, c, g or t
  modified_base (3221571)..(3221571): a, c, g or t
  modified_base (3221641)..(3221641): a, c, g or t
  modified_base (3222061)..(3222064): a, c, g or t
  modified_base (3225297)..(3225297): a, c, g or t
  modified_base (3226050)..(3226050): a, c, g or t
  modified_base (3226608)..(3226608): a, c, g or t
  modified_base (3226638)..(3226638): a, c, g or t
  modified_base (3227308)..(3227308): a, c, g or t
  modified_base (3233468)..(3233471): a, c, g or t
  modified_base (3235375)..(3235375): a, c, g or t
  modified_base (3236104)..(3236104): a, c, g or t
  modified_base (3240723)..(3240723): a, c, g or t
  modified_base (3240735)..(3240735): a, c, g or t
  modified_base (3240858)..(3240858): a, c, g or t
  modified_base (3241741)..(3241741): a, c, g or t
  modified_base (3242696)..(3242696): a, c, g or t
  modified_base (3246133)..(3246134): a, c, g or t
  modified_base (3246136)..(3246141): a, c, g or t
  modified_base (3248166)..(3248168): a, c, g or t
  modified_base (3249290)..(3249290): a, c, g or t
  modified_base (3249529)..(3249531): a, c, g or t
  modified_base (3250789)..(3250792): a, c, g or t
  modified_base (3252665)..(3252665): a, c, g or t
  modified_base (3253249)..(3253249): a, c, g or t
  modified_base (3260448)..(3260448): a, c, g or t
  modified_base (3260741)..(3260741): a, c, g or t
  modified_base (3262189)..(3262189): a, c, g or t
  modified_base (3262832)..(3262833): a, c, g or t
  modified_base (3263272)..(3263272): a, c, g or t
  modified_base (3263936)..(3263936): a, c, g or t
  modified_base (3264571)..(3264571): a, c, g or t
  modified_base (3267053)..(3267055): a, c, g or t
  modified_base (3267958)..(3267958): a, c, g or t
  modified_base (3268838)..(3268838): a, c, g or t
  modified_base (3268840)..(3268840): a, c, g or t
  modified_base (3271173)..(3271185): a, c, g or t
  modified_base (3271642)..(3271643): a, c, g or t
  modified_base (3271730)..(3271730): a, c, g or t
  modified_base (3277243)..(3277249): a, c, g or t
  modified_base (3277402)..(3277405): a, c, g or t
  modified_base (3278300)..(3278300): a, c, g or t
  modified_base (3279934)..(3279934): a, c, g or t
  modified_base (3281771)..(3281771): a, c, g or t
  modified_base (3284170)..(3284170): a, c, g or t
  modified_base (3285950)..(3285953): a, c, g or t
  modified_base (3287213)..(3287213): a, c, g or t
  modified_base (3289368)..(3289368): a, c, g or t
  modified_base (3290692)..(3290695): a, c, g or t
  modified_base (3293143)..(3293143): a, c, g or t
  modified_base (3293215)..(3293215): a, c, g or t
  modified_base (3293432)..(3293436): a, c, g or t
  modified_base (3293771)..(3293771): a, c, g or t
  modified_base (3295887)..(3295887): a, c, g or t
  modified_base (3296035)..(3296035): a, c, g or t
  modified_base (3298418)..(3298418): a, c, g or t
  modified_base (3300929)..(3300935): a, c, g or t
  modified_base (3302035)..(3302035): a, c, g or t
  modified_base (3302503)..(3302503): a, c, g or t
  modified_base (3304282)..(3304282): a, c, g or t
  modified_base (3304427)..(3304434): a, c, g or t
  modified_base (3305394)..(3305394): a, c, g or t
  modified_base (3305515)..(3305515): a, c, g or t
  modified_base (3308746)..(3308763): a, c, g or t
  modified_base (3308827)..(3308884): a, c, g or t
  modified_base (3308904)..(3308905): a, c, g or t
  modified_base (3308956)..(3308957): a, c, g or t
  modified_base (3309745)..(3309745): a, c, g or t
  modified_base (3310031)..(3310031): a, c, g or t
  modified_base (3310143)..(3310143): a, c, g or t
  modified_base (3310294)..(3310294): a, c, g or t
  modified_base (3310973)..(3310974): a, c, g or t
  modified_base (3310976)..(3310978): a, c, g or t
  modified_base (3311977)..(3311977): a, c, g or t
  modified_base (3312004)..(3312004): a, c, g or t
  modified_base (3314489)..(3314492): a, c, g or t
  modified_base (3317264)..(3317264): a, c, g or t
  modified_base (3319849)..(3319849): a, c, g or t
  modified_base (3322927)..(3322930): a, c, g or t
  modified_base (3323915)..(3323918): a, c, g or t
  modified_base (3325685)..(3325685): a, c, g or t
  modified_base (3330324)..(3330324): a, c, g or t
  modified_base (3331812)..(3331812): a, c, g or t
  modified_base (3332073)..(3332073): a, c, g or t
  modified_base (3332849)..(3332849): a, c, g or t
  modified_base (3333716)..(3333720): a, c, g or t
  modified_base (3334535)..(3334535): a, c, g or t
  modified_base (3335688)..(3335688): a, c, g or t
  modified_base (3336243)..(3336243): a, c, g or t
  modified_base (3339519)..(3339519): a, c, g or t
  modified_base (3340831)..(3340831): a, c, g or t
  modified_base (3341456)..(3341456): a, c, g or t
  modified_base (3344291)..(3344291): a, c, g or t
  modified_base (3344343)..(3344343): a, c, g or t
  modified_base (3345566)..(3345569): a, c, g or t
  modified_base (3345571)..(3345572): a, c, g or t
  modified_base (3345586)..(3345586): a, c, g or t
  modified_base (3347347)..(3347351): a, c, g or t
  modified_base (3348174)..(3348174): a, c, g or t
  modified_base (3348441)..(3348441): a, c, g or t
  modified_base (3349675)..(3349675): a, c, g or t
  modified_base (3349677)..(3349694): a, c, g or t
  modified_base (3349743)..(3349757): a, c, g or t
  modified_base (3350654)..(3350654): a, c, g or t
  modified_base (3352553)..(3352556): a, c, g or t
  modified_base (3352746)..(3352750): a, c, g or t
  modified_base (3352752)..(3352754): a, c, g or t
  modified_base (3352757)..(3352759): a, c, g or t
  modified_base (3353368)..(3353369): a, c, g or t
  modified_base (3353449)..(3353452): a, c, g or t
  modified_base (3353933)..(3353936): a, c, g or t
  modified_base (3356184)..(3356188): a, c, g or t
  modified_base (3356278)..(3356286): a, c, g or t
  modified_base (3356442)..(3356442): a, c, g or t
  modified_base (3356623)..(3356623): a, c, g or t
  modified_base (3357613)..(3357614): a, c, g or t
  modified_base (3357637)..(3357637): a, c, g or t
  modified_base (3358351)..(3358351): a, c, g or t
  modified_base (3358709)..(3358709): a, c, g or t
  modified_base (3358858)..(3358864): a, c, g or t
  modified_base (3361383)..(3361383): a, c, g or t
  modified_base (3362463)..(3362467): a, c, g or t
  modified_base (3364830)..(3364833): a, c, g or t
  modified_base (3365122)..(3365124): a, c, g or t
  modified_base (3365304)..(3365304): a, c, g or t
  modified_base (3366041)..(3366041): a, c, g or t
  modified_base (3366659)..(3366663): a, c, g or t
  modified_base (3366762)..(3366762): a, c, g or t
  modified_base (3368383)..(3368383): a, c, g or t
  modified_base (3368539)..(3368540): a, c, g or t
  modified_base (3369779)..(3369779): a, c, g or t
  modified_base (3371456)..(3371456): a, c, g or t
  modified_base (3373456)..(3373459): a, c, g or t
  modified_base (3377070)..(3377070): a, c, g or t
  modified_base (3378740)..(3378740): a, c, g or t
  modified_base (3378898)..(3378898): a, c, g or t
  modified_base (3379032)..(3379037): a, c, g or t
  modified_base (3380382)..(3380382): a, c, g or t
  modified_base (3381488)..(3381491): a, c, g or t
  modified_base (3381494)..(3381494): a, c, g or t
  modified_base (3383303)..(3383303): a, c, g or t
  modified_base (3384353)..(3384353): a, c, g or t
  modified_base (3385119)..(3385119): a, c, g or t
  modified_base (3386021)..(3386021): a, c, g or t
  modified_base (3388336)..(3388336): a, c, g or t
  modified_base (3389764)..(3389764): a, c, g or t
  modified_base (3394036)..(3394036): a, c, g or t
  modified_base (3395278)..(3395278): a, c, g or t
  modified_base (3398643)..(3398643): a, c, g or t
  modified_base (3399363)..(3399363): a, c, g or t
  modified_base (3399366)..(3399366): a, c, g or t
  modified_base (3400770)..(3400770): a, c, g or t
  modified_base (3401157)..(3401157): a, c, g or t
  modified_base (3406596)..(3406596): a, c, g or t
  modified_base (3406625)..(3406625): a, c, g or t
  modified_base (3407291)..(3407291): a, c, g or t
  modified_base (3408673)..(3408673): a, c, g or t
  modified_base (3409618)..(3409618): a, c, g or t
  modified_base (3410581)..(3410581): a, c, g or t
  modified_base (3410782)..(3410782): a, c, g or t
  modified_base (3410864)..(3410864): a, c, g or t
  modified_base (3412044)..(3412047): a, c, g or t
  modified_base (3413611)..(3413611): a, c, g or t
  modified_base (3414350)..(3414350): a, c, g or t
  modified_base (3418396)..(3418396): a, c, g or t
  modified_base (3418401)..(3418408): a, c, g or t
  modified_base (3418924)..(3418924): a, c, g or t
  modified_base (3419335)..(3419335): a, c, g or t
  modified_base (3419355)..(3419357): a, c, g or t
  modified_base (3419475)..(3419475): a, c, g or t
  modified_base (3420870)..(3420873): a, c, g or t
  modified_base (3421733)..(3421734): a, c, g or t
  modified_base (3421756)..(3421756): a, c, g or t
  modified_base (3422711)..(3422711): a, c, g or t
  modified_base (3430719)..(3430719): a, c, g or t
  modified_base (3432516)..(3432516): a, c, g or t
  modified_base (3433866)..(3433866): a, c, g or t
  modified_base (3433869)..(3433872): a, c, g or t
  modified_base (3437895)..(3437895): a, c, g or t
  modified_base (3439090)..(3439094): a, c, g or t
  modified_base (3439511)..(3439511): a, c, g or t
  modified_base (3439875)..(3439881): a, c, g or t
  modified_base (3441663)..(3441663): a, c, g or t
  modified_base (3442958)..(3442958): a, c, g or t
  modified_base (3442985)..(3442985): a, c, g or t
  modified_base (3443059)..(3443059): a, c, g or t
  modified_base (3443080)..(3443080): a, c, g or t
  modified_base (3444832)..(3444835): a, c, g or t
  modified_base (3445274)..(3445274): a, c, g or t
  modified_base (3446411)..(3446415): a, c, g or t
  modified_base (3448269)..(3448269): a, c, g or t
  modified_base (3451070)..(3451078): a, c, g or t
  modified_base (3451414)..(3451417): a, c, g or t
  modified_base (3456066)..(3456066): a, c, g or t
  modified_base (3457025)..(3457025): a, c, g or t
  modified_base (3457446)..(3457446): a, c, g or t
  modified_base (3460342)..(3460346): a, c, g or t
  modified_base (3460409)..(3460412): a, c, g or t
  modified_base (3460414)..(3460418): a, c, g or t
  modified_base (3460724)..(3460724): a, c, g or t
  modified_base (3463660)..(3463660): a, c, g or t
  modified_base (3466129)..(3466129): a, c, g or t
  modified_base (3467531)..(3467531): a, c, g or t
  modified_base (3468766)..(3468766): a, c, g or t
  modified_base (3471704)..(3471704): a, c, g or t
  modified_base (3471909)..(3471909): a, c, g or t
  modified_base (3472140)..(3472140): a, c, g or t
  modified_base (3472695)..(3472698): a, c, g or t
  modified_base (3473636)..(3473636): a, c, g or t
  modified_base (3475723)..(3475725): a, c, g or t
  modified_base (3478478)..(3478478): a, c, g or t
  modified_base (3480109)..(3480109): a, c, g or t
  modified_base (3481776)..(3481777): a, c, g or t
  modified_base (3483200)..(3483203): a, c, g or t
  modified_base (3483968)..(3483968): a, c, g or t
  modified_base (3485537)..(3485537): a, c, g or t
  modified_base (3486097)..(3486097): a, c, g or t
  modified_base (3486757)..(3486757): a, c, g or t
  modified_base (3487978)..(3487983): a, c, g or t
  modified_base (3488066)..(3488066): a, c, g or t
  modified_base (3488137)..(3488137): a, c, g or t
  modified_base (3489298)..(3489301): a, c, g or t
  modified_base (3489927)..(3489930): a, c, g or t
  modified_base (3491949)..(3491959): a, c, g or t
  modified_base (3491961)..(3491962): a, c, g or t
  modified_base (3492486)..(3492486): a, c, g or t
  modified_base (3492491)..(3492498): a, c, g or t
  modified_base (3493127)..(3493132): a, c, g or t
  modified_base (3493684)..(3493687): a, c, g or t
  modified_base (3493805)..(3493808): a, c, g or t
  modified_base (3494663)..(3494663): a, c, g or t
  modified_base (3495192)..(3495195): a, c, g or t
  modified_base (3495197)..(3495200): a, c, g or t
  modified_base (3495338)..(3495341): a, c, g or t
  modified_base (3495346)..(3495347): a, c, g or t
  modified_base (3495354)..(3495355): a, c, g or t
  modified_base (3495359)..(3495360): a, c, g or t
  modified_base (3500662)..(3500671): a, c, g or t
  modified_base (3502696)..(3502696): a, c, g or t
  modified_base (3504057)..(3504060): a, c, g or t
  modified_base (3504301)..(3504301): a, c, g or t
  modified_base (3504561)..(3504564): a, c, g or t
  modified_base (3504936)..(3504997): a, c, g or t
  modified_base (3505569)..(3505569): a, c, g or t
  modified_base (3506219)..(3506219): a, c, g or t
  modified_base (3506312)..(3506312): a, c, g or t
  modified_base (3509495)..(3509495): a, c, g or t
  modified_base (3510792)..(3510792): a, c, g or t
  modified_base (3511409)..(3511409): a, c, g or t
  modified_base (3512408)..(3512408): a, c, g or t
  modified_base (3512519)..(3512519): a, c, g or t
  modified_base (3514691)..(3514691): a, c, g or t
  modified_base (3515137)..(3515137): a, c, g or t
  modified_base (3515947)..(3515947): a, c, g or t
  modified_base (3516990)..(3516990): a, c, g or t
  modified_base (3518047)..(3518047): a, c, g or t
  modified_base (3518837)..(3518837): a, c, g or t
  modified_base (3520613)..(3520613): a, c, g or t
  modified_base (3521128)..(3521128): a, c, g or t
  modified_base (3521796)..(3521796): a, c, g or t
  modified_base (3522001)..(3522004): a, c, g or t
  modified_base (3522046)..(3522046): a, c, g or t
  modified_base (3522065)..(3522065): a, c, g or t
  modified_base (3522144)..(3522144): a, c, g or t
  modified_base (3525461)..(3525461): a, c, g or t
  modified_base (3527270)..(3527270): a, c, g or t
  modified_base (3528388)..(3528388): a, c, g or t
  modified_base (3529613)..(3529613): a, c, g or t
  modified_base (3529828)..(3529828): a, c, g or t
  modified_base (3533793)..(3533793): a, c, g or t
  modified_base (3535009)..(3535009): a, c, g or t
  modified_base (3535649)..(3535655): a, c, g or t
  modified_base (3538546)..(3538546): a, c, g or t
  modified_base (3539027)..(3539027): a, c, g or t
  modified_base (3542343)..(3542344): a, c, g or t
  modified_base (3542542)..(3542542): a, c, g or t
  modified_base (3544323)..(3544323): a, c, g or t
  modified_base (3544389)..(3544389): a, c, g or t
  modified_base (3546038)..(3546038): a, c, g or t
  modified_base (3548739)..(3548739): a, c, g or t
  modified_base (3550616)..(3550616): a, c, g or t
  modified_base (3551139)..(3551139): a, c, g or t
  modified_base (3551557)..(3551560): a, c, g or t
  modified_base (3556893)..(3556896): a, c, g or t
  modified_base (3560671)..(3560671): a, c, g or t
  modified_base (3563615)..(3563617): a, c, g or t
  modified_base (3564140)..(3564141): a, c, g or t
  modified_base (3564161)..(3564161): a, c, g or t
  modified_base (3565549)..(3565550): a, c, g or t
  modified_base (3565818)..(3565818): a, c, g or t
  modified_base (3568912)..(3568912): a, c, g or t
  modified_base (3569623)..(3569627): a, c, g or t
  modified_base (3570377)..(3570377): a, c, g or t
  modified_base (3571526)..(3571532): a, c, g or t
  modified_base (3572917)..(3572917): a, c, g or t
  modified_base (3573254)..(3573254): a, c, g or t
  modified_base (3573533)..(3573533): a, c, g or t
  modified_base (3574367)..(3574372): a, c, g or t
  modified_base (3574863)..(3574868): a, c, g or t
  modified_base (3578719)..(3578722): a, c, g or t
  modified_base (3581616)..(3581616): a, c, g or t
  modified_base (3581759)..(3581759): a, c, g or t
  modified_base (3584783)..(3584783): a, c, g or t
  modified_base (3585658)..(3585658): a, c, g or t
  modified_base (3585677)..(3585677): a, c, g or t
  modified_base (3585747)..(3585748): a, c, g or t
  modified_base (3585794)..(3585795): a, c, g or t
  modified_base (3589035)..(3589036): a, c, g or t
  modified_base (3589639)..(3589639): a, c, g or t
  modified_base (3591439)..(3591439): a, c, g or t
  modified_base (3591461)..(3591464): a, c, g or t
  modified_base (3591590)..(3591595): a, c, g or t
  modified_base (3591862)..(3591862): a, c, g or t
  modified_base (3593483)..(3593486): a, c, g or t
  modified_base (3594373)..(3594373): a, c, g or t
  modified_base (3594920)..(3594920): a, c, g or t
  modified_base (3596711)..(3596711): a, c, g or t
  modified_base (3596738)..(3596738): a, c, g or t
  modified_base (3600299)..(3600299): a, c, g or t
  modified_base (3600326)..(3600326): a, c, g or t
  modified_base (3600363)..(3600363): a, c, g or t
  modified_base (3600389)..(3600389): a, c, g or t
  modified_base (3600399)..(3600399): a, c, g or t
  modified_base (3600452)..(3600452): a, c, g or t
  modified_base (3600473)..(3600473): a, c, g or t
  modified_base (3600482)..(3600482): a, c, g or t
  modified_base (3601002)..(3601008): a, c, g or t
  modified_base (3601421)..(3601423): a, c, g or t
  modified_base (3601811)..(3601811): a, c, g or t
  modified_base (3602602)..(3602603): a, c, g or t
  modified_base (3602608)..(3602608): a, c, g or t
  modified_base (3602980)..(3602980): a, c, g or t
  modified_base (3604262)..(3604267): a, c, g or t
  modified_base (3604529)..(3604529): a, c, g or t
  modified_base (3604754)..(3604754): a, c, g or t
  modified_base (3606961)..(3606961): a, c, g or t
  modified_base (3612588)..(3612588): a, c, g or t
  modified_base (3613356)..(3613356): a, c, g or t
  modified_base (3613726)..(3613726): a, c, g or t
  modified_base (3613729)..(3613729): a, c, g or t
  modified_base (3613894)..(3613894): a, c, g or t
  modified_base (3614719)..(3614719): a, c, g or t
  modified_base (3615525)..(3615525): a, c, g or t
  modified_base (3615601)..(3615603): a, c, g or t
  modified_base (3619095)..(3619095): a, c, g or t
  modified_base (3619542)..(3619542): a, c, g or t
  modified_base (3620424)..(3620424): a, c, g or t
  modified_base (3621826)..(3621829): a, c, g or t
  modified_base (3622342)..(3622350): a, c, g or t
  modified_base (3622808)..(3622808): a, c, g or t
  modified_base (3622855)..(3622855): a, c, g or t
  modified_base (3623162)..(3623162): a, c, g or t
  modified_base (3623529)..(3623529): a, c, g or t
  modified_base (3623740)..(3623740): a, c, g or t
  modified_base (3624899)..(3624911): a, c, g or t
  modified_base (3627746)..(3627746): a, c, g or t
  modified_base (3629564)..(3629567): a, c, g or t
  modified_base (3631435)..(3631435): a, c, g or t
  modified_base (3635151)..(3635151): a, c, g or t
  modified_base (3636289)..(3636289): a, c, g or t
  modified_base (3636291)..(3636294): a, c, g or t
  modified_base (3636526)..(3636529): a, c, g or t
  modified_base (3636533)..(3636538): a, c, g or t
  modified_base (3636851)..(3636851): a, c, g or t
  modified_base (3637361)..(3637361): a, c, g or t
  modified_base (3637995)..(3637998): a, c, g or t
  modified_base (3639140)..(3639140): a, c, g or t
  modified_base (3639674)..(3639674): a, c, g or t
  modified_base (3643396)..(3643396): a, c, g or t
  modified_base (3643552)..(3643559): a, c, g or t
  modified_base (3643757)..(3643765): a, c, g or t
  modified_base (3644226)..(3644226): a, c, g or t
  modified_base (3646706)..(3646713): a, c, g or t
  modified_base (3647755)..(3647755): a, c, g or t
  modified_base (3648202)..(3648202): a, c, g or t
  modified_base (3648745)..(3648745): a, c, g or t
  modified_base (3649348)..(3649348): a, c, g or t
  modified_base (3649440)..(3649440): a, c, g or t
  modified_base (3650389)..(3650389): a, c, g or t
  modified_base (3652088)..(3652088): a, c, g or t
  modified_base (3657114)..(3657114): a, c, g or t
  modified_base (3657347)..(3657347): a, c, g or t
  modified_base (3658112)..(3658113): a, c, g or t
  modified_base (3658116)..(3658117): a, c, g or t
  modified_base (3658119)..(3658124): a, c, g or t
  modified_base (3658178)..(3658197): a, c, g or t
  modified_base (3663549)..(3663549): a, c, g or t
  modified_base (3663777)..(3663777): a, c, g or t
  modified_base (3666444)..(3666444): a, c, g or t
  modified_base (3668485)..(3668485): a, c, g or t
  modified_base (3668515)..(3668515): a, c, g or t
  modified_base (3669368)..(3669371): a, c, g or t
  modified_base (3671456)..(3671456): a, c, g or t
  modified_base (3672890)..(3672890): a, c, g or t
  modified_base (3674123)..(3674123): a, c, g or t
  modified_base (3674813)..(3674813): a, c, g or t
  modified_base (3676512)..(3676512): a, c, g or t
  modified_base (3676817)..(3676817): a, c, g or t
  modified_base (3677955)..(3677955): a, c, g or t
  modified_base (3679852)..(3679852): a, c, g or t
  modified_base (3681271)..(3681275): a, c, g or t
  modified_base (3681835)..(3681835): a, c, g or t
  modified_base (3682789)..(3682789): a, c, g or t
  modified_base (3683579)..(3683582): a, c, g or t
  modified_base (3684054)..(3684055): a, c, g or t
  modified_base (3684575)..(3684575): a, c, g or t
  modified_base (3685071)..(3685071): a, c, g or t
  modified_base (3685488)..(3685488): a, c, g or t
  modified_base (3688431)..(3688431): a, c, g or t
  modified_base (3689411)..(3689411): a, c, g or t
  modified_base (3691407)..(3691407): a, c, g or t
  modified_base (3693291)..(3693291): a, c, g or t
  modified_base (3693996)..(3694001): a, c, g or t
  modified_base (3695551)..(3695551): a, c, g or t
  modified_base (3695567)..(3695567): a, c, g or t
  modified_base (3696854)..(3696854): a, c, g or t
  modified_base (3701656)..(3701668): a, c, g or t
  modified_base (3702790)..(3702790): a, c, g or t
  modified_base (3706152)..(3706152): a, c, g or t
  modified_base (3706157)..(3706157): a, c, g or t
  modified_base (3712369)..(3712370): a, c, g or t
  modified_base (3712374)..(3712375): a, c, g or t
  modified_base (3712377)..(3712378): a, c, g or t
  modified_base (3716735)..(3716735): a, c, g or t
  modified_base (3719758)..(3719765): a, c, g or t
  modified_base (3720717)..(3720718): a, c, g or t
  modified_base (3723666)..(3723666): a, c, g or t
  modified_base (3726007)..(3726007): a, c, g or t
  modified_base (3726465)..(3726465): a, c, g or t
  modified_base (3728336)..(3728336): a, c, g or t
  modified_base (3729176)..(3729176): a, c, g or t
  modified_base (3730560)..(3730560): a, c, g or t
  modified_base (3732921)..(3732921): a, c, g or t
  modified_base (3736595)..(3736595): a, c, g or t
  modified_base (3737340)..(3737340): a, c, g or t
  modified_base (3737369)..(3737369): a, c, g or t
  modified_base (3737738)..(3737738): a, c, g or t
  modified_base (3738314)..(3738317): a, c, g or t
  modified_base (3738543)..(3738543): a, c, g or t
  modified_base (3739297)..(3739297): a, c, g or t
  modified_base (3744581)..(3744581): a, c, g or t
  modified_base (3745243)..(3745243): a, c, g or t
  modified_base (3746263)..(3746263): a, c, g or t
  modified_base (3746382)..(3746382): a, c, g or t
  modified_base (3749405)..(3749406): a, c, g or t
  modified_base (3749712)..(3749712): a, c, g or t
  modified_base (3749756)..(3749760): a, c, g or t
  modified_base (3752578)..(3752578): a, c, g or t
  modified_base (3753132)..(3753132): a, c, g or t
  modified_base (3754082)..(3754087): a, c, g or t
  modified_base (3755319)..(3755319): a, c, g or t
  modified_base (3755895)..(3755895): a, c, g or t
  modified_base (3757956)..(3757956): a, c, g or t
  modified_base (3760115)..(3760115): a, c, g or t
  modified_base (3761391)..(3761395): a, c, g or t
  modified_base (3761398)..(3761399): a, c, g or t
  modified_base (3762798)..(3762798): a, c, g or t
  modified_base (3763915)..(3763915): a, c, g or t
  modified_base (3764143)..(3764143): a, c, g or t
  modified_base (3769877)..(3769882): a, c, g or t
  modified_base (3772608)..(3772608): a, c, g or t
  modified_base (3772612)..(3772612): a, c, g or t
  modified_base (3773026)..(3773026): a, c, g or t
  modified_base (3773324)..(3773344): a, c, g or t
  modified_base (3773347)..(3773351): a, c, g or t
  modified_base (3773850)..(3773850): a, c, g or t
  modified_base (3774358)..(3774361): a, c, g or t
  modified_base (3776468)..(3776471): a, c, g or t
  modified_base (3778759)..(3778759): a, c, g or t
  modified_base (3781398)..(3781398): a, c, g or t
  modified_base (3781968)..(3781968): a, c, g or t
  modified_base (3782124)..(3782124): a, c, g or t
  modified_base (3783077)..(3783077): a, c, g or t
  modified_base (3783267)..(3783268): a, c, g or t
  modified_base (3785227)..(3785228): a, c, g or t
  modified_base (3785231)..(3785231): a, c, g or t
  modified_base (3787014)..(3787015): a, c, g or t
  modified_base (3787038)..(3787038): a, c, g or t
  modified_base (3787056)..(3787057): a, c, g or t
  modified_base (3787241)..(3787241): a, c, g or t
  modified_base (3787291)..(3787291): a, c, g or t
  modified_base (3787293)..(3787294): a, c, g or t
  modified_base (3787470)..(3787470): a, c, g or t
  modified_base (3788907)..(3788910): a, c, g or t
  modified_base (3789329)..(3789330): a, c, g or t
  modified_base (3789478)..(3789479): a, c, g or t
  modified_base (3789495)..(3789495): a, c, g or t
  modified_base (3789530)..(3789559): a, c, g or t
  modified_base (3789727)..(3789728): a, c, g or t
  modified_base (3789804)..(3789805): a, c, g or t
  modified_base (3789809)..(3789810): a, c, g or t
  modified_base (3789838)..(3789838): a, c, g or t
  modified_base (3789919)..(3789920): a, c, g or t
  modified_base (3790096)..(3790096): a, c, g or t
  modified_base (3790101)..(3790101): a, c, g or t
  modified_base (3790103)..(3790121): a, c, g or t
  modified_base (3790126)..(3790126): a, c, g or t
  modified_base (3790149)..(3790150): a, c, g or t
  modified_base (3790154)..(3790155): a, c, g or t
  modified_base (3790378)..(3790381): a, c, g or t
  modified_base (3790515)..(3790515): a, c, g or t
  modified_base (3790887)..(3790887): a, c, g or t
  modified_base (3791034)..(3791034): a, c, g or t
  modified_base (3791193)..(3791212): a, c, g or t
  modified_base (3792368)..(3792408): a, c, g or t
  modified_base (3796022)..(3796022): a, c, g or t
  modified_base (3797264)..(3797264): a, c, g or t
  modified_base (3799100)..(3799100): a, c, g or t
  modified_base (3800648)..(3800648): a, c, g or t
  modified_base (3802297)..(3802297): a, c, g or t
  modified_base (3802915)..(3802924): a, c, g or t
  modified_base (3812708)..(3812708): a, c, g or t
  modified_base (3813834)..(3813834): a, c, g or t
  modified_base (3817355)..(3817355): a, c, g or t
  modified_base (3818053)..(3818056): a, c, g or t
  modified_base (3818329)..(3818336): a, c, g or t
  modified_base (3820931)..(3820931): a, c, g or t
  modified_base (3822851)..(3822851): a, c, g or t
  modified_base (3823536)..(3823536): a, c, g or t
  modified_base (3824349)..(3824349): a, c, g or t
  modified_base (3824796)..(3824796): a, c, g or t
  modified_base (3824934)..(3824934): a, c, g or t
  modified_base (3826097)..(3826114): a, c, g or t
  modified_base (3828883)..(3828883): a, c, g or t
  modified_base (3831264)..(3831264): a, c, g or t
  modified_base (3831266)..(3831266): a, c, g or t
  modified_base (3831718)..(3831719): a, c, g or t
  modified_base (3832785)..(3832785): a, c, g or t
  modified_base (3835626)..(3835626): a, c, g or t
  modified_base (3837116)..(3837116): a, c, g or t
  modified_base (3839937)..(3839940): a, c, g or t
  modified_base (3839944)..(3839944): a, c, g or t
  modified_base (3843435)..(3843435): a, c, g or t
  modified_base (3844400)..(3844400): a, c, g or t
  modified_base (3844423)..(3844423): a, c, g or t
  modified_base (3844426)..(3844426): a, c, g or t
  modified_base (3844456)..(3844456): a, c, g or t
  modified_base (3850671)..(3850680): a, c, g or t
  modified_base (3850682)..(3850683): a, c, g or t
  modified_base (3850711)..(3850711): a, c, g or t
  modified_base (3853605)..(3853605): a, c, g or t
  modified_base (3858660)..(3858664): a, c, g or t
  modified_base (3861164)..(3861167): a, c, g or t
  modified_base (3874142)..(3874142): a, c, g or t
  modified_base (3877944)..(3877948): a, c, g or t
  modified_base (3884540)..(3884540): a, c, g or t
  modified_base (3887677)..(3887677): a, c, g or t
  modified_base (3888557)..(3888557): a, c, g or t
  modified_base (3890393)..(3890393): a, c, g or t
  modified_base (3894806)..(3894806): a, c, g or t
  modified_base (3894926)..(3894926): a, c, g or t
  modified_base (3897086)..(3897086): a, c, g or t
  modified_base (3899568)..(3899568): a, c, g or t
  modified_base (3899965)..(3899965): a, c, g or t
  modified_base (3900594)..(3900594): a, c, g or t
  modified_base (3902788)..(3902788): a, c, g or t
  modified_base (3903037)..(3903037): a, c, g or t
  modified_base (3903050)..(3903050): a, c, g or t
  modified_base (3903053)..(3903053): a, c, g or t
  modified_base (3904432)..(3904432): a, c, g or t
  modified_base (3904434)..(3904434): a, c, g or t
  modified_base (3906095)..(3906100): a, c, g or t
  modified_base (3906109)..(3906109): a, c, g or t
  modified_base (3908783)..(3908783): a, c, g or t
  modified_base (3908950)..(3908950): a, c, g or t
  modified_base (3913247)..(3913247): a, c, g or t
  modified_base (3914455)..(3914455): a, c, g or t
  modified_base (3914723)..(3914723): a, c, g or t
  modified_base (3914744)..(3914744): a, c, g or t
  modified_base (3921334)..(3921346): a, c, g or t
  modified_base (3924175)..(3924175): a, c, g or t
  modified_base (3924338)..(3924338): a, c, g or t
  modified_base (3925305)..(3925308): a, c, g or t
  modified_base (3926179)..(3926184): a, c, g or t
  modified_base (3930223)..(3930226): a, c, g or t
  modified_base (3930933)..(3930933): a, c, g or t
  modified_base (3931005)..(3931005): a, c, g or t
  modified_base (3931033)..(3931042): a, c, g or t
  modified_base (3932814)..(3932814): a, c, g or t
  modified_base (3933174)..(3933174): a, c, g or t
  modified_base (3933605)..(3933605): a, c, g or t
  modified_base (3934766)..(3934773): a, c, g or t
  modified_base (3936018)..(3936018): a, c, g or t
  modified_base (3936919)..(3936924): a, c, g or t
  modified_base (3946319)..(3946319): a, c, g or t
  modified_base (3950737)..(3950743): a, c, g or t
  modified_base (3954681)..(3954681): a, c, g or t
  modified_base (3954690)..(3954690): a, c, g or t
  modified_base (3960574)..(3960574): a, c, g or t
  modified_base (3960576)..(3960577): a, c, g or t
  modified_base (3960580)..(3960581): a, c, g or t
  modified_base (3963507)..(3963510): a, c, g or t
  modified_base (3963670)..(3963679): a, c, g or t
  modified_base (3964224)..(3964224): a, c, g or t
  modified_base (3966262)..(3966262): a, c, g or t
  modified_base (3967086)..(3967086): a, c, g or t
  modified_base (3970568)..(3970568): a, c, g or t
  modified_base (3971338)..(3971338): a, c, g or t
  modified_base (3972407)..(3972408): a, c, g or t
  modified_base (3975795)..(3975795): a, c, g or t
  modified_base (3977416)..(3977416): a, c, g or t
  modified_base (3977859)..(3977859): a, c, g or t
  modified_base (3978946)..(3978949): a, c, g or t
  modified_base (3979298)..(3979298): a, c, g or t
  modified_base (3983744)..(3983747): a, c, g or t
  modified_base (3983749)..(3983753): a, c, g or t
  modified_base (3986716)..(3986719): a, c, g or t
  modified_base (3986794)..(3986794): a, c, g or t
  modified_base (3987735)..(3987749): a, c, g or t
  modified_base (3987842)..(3987842): a, c, g or t
  modified_base (3990404)..(3990406): a, c, g or t
  modified_base (3992861)..(3992862): a, c, g or t
  modified_base (3992869)..(3992870): a, c, g or t
  modified_base (3993115)..(3993115): a, c, g or t
  modified_base (3993336)..(3993336): a, c, g or t
  modified_base (3995518)..(3995518): a, c, g or t
  modified_base (3995532)..(3995532): a, c, g or t
  modified_base (3996677)..(3996677): a, c, g or t
  modified_base (3996942)..(3996942): a, c, g or t
  modified_base (3999655)..(3999658): a, c, g or t
  modified_base (4000321)..(4000321): a, c, g or t
  modified_base (4001798)..(4001798): a, c, g or t
  modified_base (4002296)..(4002296): a, c, g or t
  modified_base (4002685)..(4002688): a, c, g or t
  modified_base (4004528)..(4004528): a, c, g or t
  modified_base (4008432)..(4008432): a, c, g or t
  modified_base (4010113)..(4010113): a, c, g or t
  modified_base (4012579)..(4012579): a, c, g or t
  modified_base (4013833)..(4013836): a, c, g or t
  modified_base (4015561)..(4015561): a, c, g or t
  modified_base (4016117)..(4016117): a, c, g or t
  modified_base (4016979)..(4016979): a, c, g or t
  modified_base (4017458)..(4017458): a, c, g or t
  modified_base (4017462)..(4017465): a, c, g or t
  modified_base (4019776)..(4019776): a, c, g or t
  modified_base (4019844)..(4019844): a, c, g or t
  modified_base (4024915)..(4024915): a, c, g or t
  modified_base (4031924)..(4031924): a, c, g or t
  modified_base (4035174)..(4035176): a, c, g or t
  modified_base (4035285)..(4035285): a, c, g or t
  modified_base (4035287)..(4035290): a, c, g or t
  modified_base (4035655)..(4035655): a, c, g or t
  modified_base (4035980)..(4035982): a, c, g or t
  modified_base (4038156)..(4038157): a, c, g or t
  modified_base (4038163)..(4038164): a, c, g or t
  modified_base (4038511)..(4038511): a, c, g or t
  modified_base (4040265)..(4040268): a, c, g or t
  modified_base (4040781)..(4040786): a, c, g or t
  modified_base (4041998)..(4041998): a, c, g or t
  modified_base (4045936)..(4045936): a, c, g or t
  modified_base (4046602)..(4046607): a, c, g or t
  modified_base (4048022)..(4048022): a, c, g or t
  modified_base (4050349)..(4050352): a, c, g or t
  modified_base (4050354)..(4050361): a, c, g or t
  modified_base (4050488)..(4050488): a, c, g or t
  modified_base (4050538)..(4050538): a, c, g or t
  modified_base (4054044)..(4054044): a, c, g or t
  modified_base (4054048)..(4054048): a, c, g or t
  modified_base (4055721)..(4055721): a, c, g or t
  modified_base (4059227)..(4059227): a, c, g or t
  modified_base (4060133)..(4060136): a, c, g or t
  modified_base (4060316)..(4060316): a, c, g or t
  modified_base (4061123)..(4061123): a, c, g or t
  modified_base (4062799)..(4062799): a, c, g or t
  modified_base (4062814)..(4062817): a, c, g or t
  modified_base (4062819)..(4062827): a, c, g or t
  modified_base (4062829)..(4062829): a, c, g or t
  modified_base (4063007)..(4063007): a, c, g or t
  modified_base (4063998)..(4063998): a, c, g or t
  modified_base (4064198)..(4064198): a, c, g or t
  modified_base (4064508)..(4064508): a, c, g or t
  modified_base (4065137)..(4065137): a, c, g or t
  modified_base (4066502)..(4066502): a, c, g or t
  modified_base (4067150)..(4067152): a, c, g or t
  modified_base (4068856)..(4068856): a, c, g or t
  modified_base (4069910)..(4069910): a, c, g or t
  modified_base (4069999)..(4069999): a, c, g or t
  modified_base (4071301)..(4071301): a, c, g or t
  modified_base (4072578)..(4072578): a, c, g or t
  modified_base (4075509)..(4075510): a, c, g or t
  modified_base (4075514)..(4075527): a, c, g or t
  modified_base (4076960)..(4076960): a, c, g or t
  modified_base (4080724)..(4080724): a, c, g or t
  modified_base (4081575)..(4081577): a, c, g or t
  modified_base (4083432)..(4083436): a, c, g or t
  modified_base (4084554)..(4084555): a, c, g or t
  modified_base (4085103)..(4085103): a, c, g or t
  modified_base (4085794)..(4085795): a, c, g or t
  modified_base (4085797)..(4085801): a, c, g or t
  modified_base (4086056)..(4086056): a, c, g or t
  modified_base (4086447)..(4086489): a, c, g or t
  modified_base (4086561)..(4086564): a, c, g or t
  modified_base (4086566)..(4086567): a, c, g or t
  modified_base (4086569)..(4086575): a, c, g or t
  modified_base (4086615)..(4086615): a, c, g or t
  modified_base (4086638)..(4086664): a, c, g or t
  modified_base (4089158)..(4089162): a, c, g or t
  modified_base (4090552)..(4090556): a, c, g or t
  modified_base (4091083)..(4091083): a, c, g or t
  modified_base (4092116)..(4092116): a, c, g or t
  modified_base (4096282)..(4096283): a, c, g or t
  modified_base (4097943)..(4097943): a, c, g or t
  modified_base (4098808)..(4098808): a, c, g or t
  modified_base (4098810)..(4098810): a, c, g or t
  modified_base (4101840)..(4101840): a, c, g or t
  modified_base (4102972)..(4102972): a, c, g or t
  modified_base (4104803)..(4104803): a, c, g or t
  modified_base (4109413)..(4109420): a, c, g or t
  modified_base (4112380)..(4112380): a, c, g or t
  modified_base (4112396)..(4112396): a, c, g or t
  modified_base (4115510)..(4115510): a, c, g or t
  modified_base (4121518)..(4121518): a, c, g or t
  modified_base (4121633)..(4121640): a, c, g or t
  modified_base (4121642)..(4121643): a, c, g or t
  modified_base (4127680)..(4127682): a, c, g or t
  modified_base (4128947)..(4128947): a, c, g or t
  modified_base (4129023)..(4129032): a, c, g or t
  modified_base (4129035)..(4129036): a, c, g or t
  modified_base (4129063)..(4129063): a, c, g or t
  modified_base (4129066)..(4129088): a, c, g or t
  modified_base (4131291)..(4131291): a, c, g or t
  modified_base (4131865)..(4131868): a, c, g or t
  modified_base (4133339)..(4133351): a, c, g or t
  modified_base (4133434)..(4133437): a, c, g or t
  modified_base (4133439)..(4133439): a, c, g or t
  modified_base (4133447)..(4133452): a, c, g or t
  modified_base (4133480)..(4133483): a, c, g or t
  modified_base (4133486)..(4133486): a, c, g or t
  modified_base (4133909)..(4133912): a, c, g or t
  modified_base (4133999)..(4133999): a, c, g or t
  modified_base (4134001)..(4134039): a, c, g or t
  modified_base (4134189)..(4134232): a, c, g or t
  modified_base (4136391)..(4136391): a, c, g or t
  modified_base (4136495)..(4136495): a, c, g or t
  modified_base (4136613)..(4136616): a, c, g or t
  modified_base (4136642)..(4136642): a, c, g or t
  modified_base (4136647)..(4136647): a, c, g or t
  modified_base (4136659)..(4136659): a, c, g or t
  modified_base (4136675)..(4136675): a, c, g or t
  modified_base (4136687)..(4136689): a, c, g or t
  modified_base (4137593)..(4137593): a, c, g or t
  modified_base (4138145)..(4138145): a, c, g or t
  modified_base (4138260)..(4138265): a, c, g or t
  modified_base (4140203)..(4140205): a, c, g or t
  modified_base (4143913)..(4143913): a, c, g or t
  modified_base (4144240)..(4144240): a, c, g or t
  modified_base (4147434)..(4147434): a, c, g or t
  modified_base (4150756)..(4150756): a, c, g or t
  modified_base (4150894)..(4150898): a, c, g or t
  modified_base (4152683)..(4152688): a, c, g or t
  modified_base (4153747)..(4153747): a, c, g or t
  modified_base (4153797)..(4153797): a, c, g or t
  modified_base (4156947)..(4156950): a, c, g or t
  modified_base (4157626)..(4157626): a, c, g or t
  modified_base (4159093)..(4159093): a, c, g or t
  modified_base (4160362)..(4160362): a, c, g or t
  modified_base (4163495)..(4163495): a, c, g or t
  modified_base (4165620)..(4165630): a, c, g or t
  modified_base (4166106)..(4166114): a, c, g or t
  modified_base (4168353)..(4168358): a, c, g or t
  modified_base (4170275)..(4170280): a, c, g or t
  modified_base (4172758)..(4172761): a, c, g or t
  modified_base (4173493)..(4173496): a, c, g or t
  modified_base (4175329)..(4175330): a, c, g or t
  modified_base (4176591)..(4176591): a, c, g or t
  modified_base (4178728)..(4178738): a, c, g or t
  modified_base (4182341)..(4182341): a, c, g or t
  modified_base (4182720)..(4182720): a, c, g or t
  modified_base (4183015)..(4183015): a, c, g or t
  modified_base (4184116)..(4184116): a, c, g or t
  modified_base (4185415)..(4185415): a, c, g or t
  modified_base (4185451)..(4185451): a, c, g or t
  modified_base (4185623)..(4185623): a, c, g or t
  modified_base (4187001)..(4187001): a, c, g or t
  modified_base (4187124)..(4187134): a, c, g or t
  modified_base (4188206)..(4188206): a, c, g or t
  modified_base (4188966)..(4188970): a, c, g or t
  modified_base (4190703)..(4190705): a, c, g or t
  modified_base (4193923)..(4193923): a, c, g or t
  modified_base (4195579)..(4195579): a, c, g or t
  modified_base (4197276)..(4197276): a, c, g or t
  modified_base (4202516)..(4202516): a, c, g or t
  modified_base (4202799)..(4202799): a, c, g or t
  modified_base (4206514)..(4206514): a, c, g or t
  modified_base (4211090)..(4211090): a, c, g or t
  modified_base (4213397)..(4213397): a, c, g or t
  modified_base (4213403)..(4213404): a, c, g or t
  modified_base (4213443)..(4213443): a, c, g or t
  modified_base (4213447)..(4213454): a, c, g or t
  modified_base (4213456)..(4213459): a, c, g or t
  modified_base (4213502)..(4213507): a, c, g or t
  modified_base (4213511)..(4213518): a, c, g or t
  modified_base (4213554)..(4213593): a, c, g or t
  modified_base (4213617)..(4213617): a, c, g or t
  modified_base (4213701)..(4213741): a, c, g or t
  modified_base (4214745)..(4214745): a, c, g or t
  modified_base (4215123)..(4215123): a, c, g or t
  modified_base (4215210)..(4215210): a, c, g or t
  modified_base (4215592)..(4215593): a, c, g or t
  modified_base (4215715)..(4215716): a, c, g or t
  modified_base (4216569)..(4216615): a, c, g or t
  modified_base (4216620)..(4216621): a, c, g or t
  modified_base (4216629)..(4216631): a, c, g or t
  modified_base (4216637)..(4216650): a, c, g or t
  modified_base (4216692)..(4216692): a, c, g or t
  modified_base (4216694)..(4216695): a, c, g or t
  modified_base (4216726)..(4216727): a, c, g or t
  modified_base (4216731)..(4216733): a, c, g or t
  modified_base (4216735)..(4216746): a, c, g or t
  modified_base (4216761)..(4216762): a, c, g or t
  modified_base (4216764)..(4216767): a, c, g or t
  modified_base (4216769)..(4216813): a, c, g or t
  modified_base (4216944)..(4216945): a, c, g or t
  modified_base (4216975)..(4216976): a, c, g or t
  modified_base (4216983)..(4216985): a, c, g or t
  modified_base (4216987)..(4216988): a, c, g or t
  modified_base (4217537)..(4217537): a, c, g or t
  modified_base (4219537)..(4219538): a, c, g or t
  modified_base (4221150)..(4221150): a, c, g or t
  modified_base (4221955)..(4221958): a, c, g or t
  modified_base (4221970)..(4221970): a, c, g or t
  modified_base (4222826)..(4222826): a, c, g or t
  modified_base (4223591)..(4223591): a, c, g or t
  modified_base (4223932)..(4223932): a, c, g or t
  modified_base (4226380)..(4226381): a, c, g or t
  modified_base (4226383)..(4226388): a, c, g or t
  modified_base (4226390)..(4226390): a, c, g or t
  modified_base (4227001)..(4227004): a, c, g or t
  modified_base (4227006)..(4227007): a, c, g or t
  modified_base (4227012)..(4227015): a, c, g or t
  modified_base (4229047)..(4229050): a, c, g or t
  modified_base (4229181)..(4229182): a, c, g or t
  modified_base (4229184)..(4229185): a, c, g or t
  modified_base (4231825)..(4231831): a, c, g or t
  modified_base (4232464)..(4232472): a, c, g or t
  modified_base (4236266)..(4236275): a, c, g or t
  modified_base (4237188)..(4237188): a, c, g or t
  modified_base (4240011)..(4240011): a, c, g or t
  modified_base (4241481)..(4241490): a, c, g or t
  modified_base (4243152)..(4243156): a, c, g or t
  modified_base (4243285)..(4243286): a, c, g or t
  modified_base (4243288)..(4243300): a, c, g or t
  modified_base (4245197)..(4245200): a, c, g or t
  modified_base (4245343)..(4245344): a, c, g or t
  modified_base (4245346)..(4245349): a, c, g or t
  modified_base (4245537)..(4245537): a, c, g or t
  modified_base (4245901)..(4245908): a, c, g or t
  modified_base (4245934)..(4245938): a, c, g or t
  modified_base (4246462)..(4246462): a, c, g or t
  modified_base (4247419)..(4247419): a, c, g or t
  modified_base (4247617)..(4247628): a, c, g or t
  modified_base (4248105)..(4248118): a, c, g or t
  modified_base (4248441)..(4248442): a, c, g or t
  modified_base (4248444)..(4248458): a, c, g or t
  modified_base (4248592)..(4248596): a, c, g or t
  modified_base (4253637)..(4253637): a, c, g or t
  modified_base (4255066)..(4255066): a, c, g or t
  modified_base (4256268)..(4256273): a, c, g or t
  modified_base (4258491)..(4258491): a, c, g or t
  modified_base (4261084)..(4261084): a, c, g or t
  modified_base (4261087)..(4261090): a, c, g or t
  modified_base (4261604)..(4261604): a, c, g or t
  modified_base (4262390)..(4262390): a, c, g or t
  modified_base (4262608)..(4262608): a, c, g or t
  modified_base (4262659)..(4262659): a, c, g or t
  modified_base (4264315)..(4264315): a, c, g or t
  modified_base (4264320)..(4264320): a, c, g or t
  modified_base (4266587)..(4266587): a, c, g or t
  modified_base (4266897)..(4266900): a, c, g or t
  modified_base (4267015)..(4267020): a, c, g or t
  modified_base (4269449)..(4269449): a, c, g or t
  modified_base (4269591)..(4269591): a, c, g or t
  modified_base (4269695)..(4269695): a, c, g or t
  modified_base (4270776)..(4270780): a, c, g or t
  modified_base (4270960)..(4270960): a, c, g or t
  modified_base (4273008)..(4273011): a, c, g or t
  modified_base (4274469)..(4274469): a, c, g or t
  modified_base (4275964)..(4275964): a, c, g or t
  modified_base (4276770)..(4276770): a, c, g or t
  modified_base (4281996)..(4281999): a, c, g or t
  modified_base (4282054)..(4282055): a, c, g or t
  modified_base (4282915)..(4282915): a, c, g or t
  modified_base (4283118)..(4283118): a, c, g or t
  modified_base (4283221)..(4283221): a, c, g or t
  modified_base (4292323)..(4292323): a, c, g or t
  modified_base (4292437)..(4292445): a, c, g or t
  modified_base (4292472)..(4292472): a, c, g or t
  modified_base (4293342)..(4293342): a, c, g or t
  modified_base (4293741)..(4293741): a, c, g or t
  modified_base (4297600)..(4297600): a, c, g or t
  modified_base (4298697)..(4298697): a, c, g or t
  modified_base (4300536)..(4300536): a, c, g or t
  modified_base (4301052)..(4301052): a, c, g or t
  modified_base (4302753)..(4302753): a, c, g or t
  modified_base (4308536)..(4308536): a, c, g or t
  modified_base (4309143)..(4309143): a, c, g or t
  modified_base (4310258)..(4310258): a, c, g or t
  modified_base (4311481)..(4311481): a, c, g or t
  modified_base (4314361)..(4314361): a, c, g or t
  modified_base (4316166)..(4316176): a, c, g or t
  modified_base (4316491)..(4316492): a, c, g or t
  modified_base (4317117)..(4317120): a, c, g or t
  modified_base (4318209)..(4318210): a, c, g or t
  modified_base (4318212)..(4318228): a, c, g or t
  modified_base (4318231)..(4318231): a, c, g or t
  modified_base (4319050)..(4319056): a, c, g or t
  modified_base (4320287)..(4320298): a, c, g or t
  modified_base (4322877)..(4322877): a, c, g or t
  modified_base (4327522)..(4327524): a, c, g or t
  modified_base (4331142)..(4331142): a, c, g or t
  modified_base (4331327)..(4331327): a, c, g or t
  modified_base (4331977)..(4331992): a, c, g or t
  modified_base (4332733)..(4332736): a, c, g or t
  modified_base (4334694)..(4334694): a, c, g or t
  modified_base (4334734)..(4334734): a, c, g or t
  modified_base (4338113)..(4338113): a, c, g or t
  modified_base (4341491)..(4341499): a, c, g or t
  modified_base (4343482)..(4343486): a, c, g or t
  modified_base (4343729)..(4343730): a, c, g or t
  modified_base (4343733)..(4343740): a, c, g or t
  modified_base (4343743)..(4343744): a, c, g or t
  modified_base (4351958)..(4351961): a, c, g or t
  modified_base (4354862)..(4354862): a, c, g or t
  modified_base (4354866)..(4354867): a, c, g or t
  modified_base (4355754)..(4355754): a, c, g or t
  modified_base (4356578)..(4356578): a, c, g or t
  modified_base (4360844)..(4360853): a, c, g or t
  modified_base (4362914)..(4362941): a, c, g or t
  modified_base (4362943)..(4362944): a, c, g or t
  modified_base (4362948)..(4362949): a, c, g or t
  modified_base (4362970)..(4362972): a, c, g or t
  modified_base (4363368)..(4363368): a, c, g or t
  modified_base (4363770)..(4363773): a, c, g or t
  modified_base (4364122)..(4364122): a, c, g or t
  modified_base (4364324)..(4364324): a, c, g or t
  modified_base (4364358)..(4364358): a, c, g or t
  modified_base (4364491)..(4364491): a, c, g or t
  modified_base (4364564)..(4364571): a, c, g or t
  modified_base (4364574)..(4364575): a, c, g or t
  modified_base (4364636)..(4364639): a, c, g or t
  modified_base (4364723)..(4364724): a, c, g or t
  modified_base (4365017)..(4365018): a, c, g or t
  modified_base (4365055)..(4365057): a, c, g or t
  modified_base (4367182)..(4367186): a, c, g or t
  modified_base (4370884)..(4370887): a, c, g or t
  modified_base (4370890)..(4370894): a, c, g or t
  modified_base (4374117)..(4374130): a, c, g or t
  modified_base (4374286)..(4374289): a, c, g or t
  modified_base (4374946)..(4374949): a, c, g or t
  modified_base (4375481)..(4375481): a, c, g or t
  modified_base (4376940)..(4376948): a, c, g or t
  modified_base (4376958)..(4376958): a, c, g or t
  modified_base (4380101)..(4380101): a, c, g or t
  modified_base (4381192)..(4381195): a, c, g or t
  modified_base (4381533)..(4381533): a, c, g or t
  modified_base (4388125)..(4388125): a, c, g or t
  modified_base (4388189)..(4388189): a, c, g or t
  modified_base (4393445)..(4393445): a, c, g or t
  modified_base (4393585)..(4393585): a, c, g or t
  modified_base (4395708)..(4395708): a, c, g or t
  modified_base (4396149)..(4396161): a, c, g or t
  modified_base (4396365)..(4396365): a, c, g or t
  modified_base (4398348)..(4398354): a, c, g or t
  modified_base (4401473)..(4401473): a, c, g or t
  modified_base (4402946)..(4402946): a, c, g or t
  modified_base (4403973)..(4403976): a, c, g or t
  modified_base (4404853)..(4404853): a, c, g or t
  modified_base (4404889)..(4404892): a, c, g or t
  modified_base (4405024)..(4405031): a, c, g or t
  modified_base (4405134)..(4405134): a, c, g or t
  modified_base (4406849)..(4406853): a, c, g or t
  modified_base (4408273)..(4408273): a, c, g or t
  modified_base (4410635)..(4410638): a, c, g or t
  modified_base (4411298)..(4411298): a, c, g or t
  modified_base (4411347)..(4411347): a, c, g or t
  modified_base (4411439)..(4411439): a, c, g or t
  modified_base (4411811)..(4411814): a, c, g or t
  modified_base (4412444)..(4412444): a, c, g or t
  modified_base (4412852)..(4412852): a, c, g or t
  modified_base (4413334)..(4413334): a, c, g or t
  modified_base (4415437)..(4415437): a, c, g or t
  modified_base (4416096)..(4416096): a, c, g or t
  modified_base (4416354)..(4416358): a, c, g or t
  modified_base (4416583)..(4416583): a, c, g or t
  modified_base (4416642)..(4416647): a, c, g or t
  modified_base (4418178)..(4418178): a, c, g or t
  modified_base (4419825)..(4419825): a, c, g or t
  modified_base (4420656)..(4420656): a, c, g or t
  modified_base (4421247)..(4421247): a, c, g or t
  modified_base (4421739)..(4421741): a, c, g or t
  modified_base (4422718)..(4422724): a, c, g or t
  modified_base (4424750)..(4424750): a, c, g or t
  modified_base (4425463)..(4425463): a, c, g or t
  modified_base (4426199)..(4426201): a, c, g or t
  modified_base (4426548)..(4426554): a, c, g or t
  modified_base (4427677)..(4427677): a, c, g or t
  modified_base (4429144)..(4429145): a, c, g or t
  modified_base (4431768)..(4431768): a, c, g or t
  modified_base (4436161)..(4436161): a, c, g or t
  modified_base (4436210)..(4436210): a, c, g or t
  modified_base (4436272)..(4436272): a, c, g or t
  modified_base (4437597)..(4437597): a, c, g or t
  modified_base (4441228)..(4441229): a, c, g or t
  modified_base (4441358)..(4441358): a, c, g or t
  modified_base (4445254)..(4445254): a, c, g or t
  modified_base (4446377)..(4446377): a, c, g or t
  modified_base (4446944)..(4446944): a, c, g or t
  modified_base (4447896)..(4447898): a, c, g or t
  modified_base (4448897)..(4448901): a, c, g or t
  modified_base (4449676)..(4449676): a, c, g or t
  modified_base (4450679)..(4450679): a, c, g or t
  modified_base (4451768)..(4451771): a, c, g or t
  modified_base (4452306)..(4452306): a, c, g or t
  modified_base (4454140)..(4454140): a, c, g or t
  modified_base (4454355)..(4454355): a, c, g or t
  modified_base (4458313)..(4458316): a, c, g or t
  modified_base (4458410)..(4458410): a, c, g or t
  modified_base (4458428)..(4458428): a, c, g or t
  modified_base (4458471)..(4458471): a, c, g or t
  modified_base (4458473)..(4458517): a, c, g or t
  modified_base (4458807)..(4458807): a, c, g or t
  modified_base (4459001)..(4459001): a, c, g or t
  modified_base (4459092)..(4459097): a, c, g or t
  modified_base (4459099)..(4459100): a, c, g or t
  modified_base (4459401)..(4459401): a, c, g or t
  modified_base (4459857)..(4459863): a, c, g or t
  modified_base (4460352)..(4460357): a, c, g or t
  modified_base (4460603)..(4460631): a, c, g or t
  modified_base (4460748)..(4460749): a, c, g or t
  modified_base (4460776)..(4460776): a, c, g or t
  modified_base (4460786)..(4460788): a, c, g or t
  modified_base (4460961)..(4460993): a, c, g or t
  modified_base (4461009)..(4461009): a, c, g or t
  modified_base (4461061)..(4461061): a, c, g or t
  modified_base (4461076)..(4461076): a, c, g or t
  modified_base (4461178)..(4461206): a, c, g or t
  modified_base (4461257)..(4461260): a, c, g or t
  modified_base (4461264)..(4461264): a, c, g or t
  modified_base (4461401)..(4461402): a, c, g or t
  modified_base (4461407)..(4461408): a, c, g or t
  modified_base (4461998)..(4461999): a, c, g or t
  modified_base (4462307)..(4462307): a, c, g or t
  modified_base (4463209)..(4463212): a, c, g or t
  modified_base (4463285)..(4463286): a, c, g or t
  modified_base (4463290)..(4463291): a, c, g or t
  modified_base (4463298)..(4463300): a, c, g or t
  modified_base (4463439)..(4463440): a, c, g or t
  modified_base (4463446)..(4463447): a, c, g or t
  modified_base (4464757)..(4464757): a, c, g or t
  modified_base (4467049)..(4467052): a, c, g or t
  modified_base (4467332)..(4467333): a, c, g or t
  modified_base (4467555)..(4467563): a, c, g or t
  modified_base (4470324)..(4470324): a, c, g or t
  modified_base (4472388)..(4472388): a, c, g or t
  modified_base (4474738)..(4474738): a, c, g or t
  modified_base (4474892)..(4474892): a, c, g or t
  modified_base (4474908)..(4474912): a, c, g or t
  modified_base (4476261)..(4476261): a, c, g or t
  modified_base (4477226)..(4477234): a, c, g or t
  modified_base (4478088)..(4478088): a, c, g or t
  modified_base (4479363)..(4479363): a, c, g or t
  modified_base (4479395)..(4479398): a, c, g or t
  modified_base (4479402)..(4479403): a, c, g or t
  modified_base (4480103)..(4480104): a, c, g or t
  modified_base (4480107)..(4480113): a, c, g or t
  modified_base (4480177)..(4480177): a, c, g or t
  modified_base (4480894)..(4480894): a, c, g or t
  modified_base (4481445)..(4481445): a, c, g or t
  modified_base (4485031)..(4485034): a, c, g or t
  modified_base (4487656)..(4487656): a, c, g or t
  modified_base (4488282)..(4488282): a, c, g or t
  modified_base (4488336)..(4488340): a, c, g or t
  modified_base (4493995)..(4493995): a, c, g or t
  modified_base (4494853)..(4494856): a, c, g or t
  modified_base (4495277)..(4495277): a, c, g or t
  modified_base (4495392)..(4495392): a, c, g or t
  modified_base (4495445)..(4495445): a, c, g or t
  modified_base (4495471)..(4495471): a, c, g or t
  modified_base (4496134)..(4496146): a, c, g or t
  modified_base (4496231)..(4496231): a, c, g or t
  modified_base (4496311)..(4496311): a, c, g or t
  modified_base (4496340)..(4496340): a, c, g or t
  modified_base (4496518)..(4496521): a, c, g or t
  modified_base (4497167)..(4497167): a, c, g or t
  modified_base (4499012)..(4499012): a, c, g or t
  modified_base (4501685)..(4501685): a, c, g or t
  modified_base (4502383)..(4502383): a, c, g or t
  modified_base (4504186)..(4504189): a, c, g or t
  modified_base (4504892)..(4504892): a, c, g or t
  modified_base (4505163)..(4505163): a, c, g or t
  modified_base (4507625)..(4507625): a, c, g or t
  modified_base (4510304)..(4510304): a, c, g or t
  modified_base (4511183)..(4511183): a, c, g or t
  modified_base (4511556)..(4511562): a, c, g or t
  modified_base (4511996)..(4512004): a, c, g or t
  modified_base (4512561)..(4512563): a, c, g or t
  modified_base (4515950)..(4515950): a, c, g or t
  modified_base (4516205)..(4516205): a, c, g or t
  modified_base (4516949)..(4516952): a, c, g or t
  modified_base (4518733)..(4518733): a, c, g or t
  modified_base (4521693)..(4521698): a, c, g or t
  modified_base (4521759)..(4521806): a, c, g or t
  modified_base (4522230)..(4522231): a, c, g or t
  modified_base (4522774)..(4522774): a, c, g or t
  modified_base (4523685)..(4523685): a, c, g or t
  modified_base (4531418)..(4531418): a, c, g or t
  modified_base (4533797)..(4533797): a, c, g or t
  modified_base (4536652)..(4536653): a, c, g or t
  modified_base (4536932)..(4536932): a, c, g or t
  modified_base (4537462)..(4537462): a, c, g or t
  modified_base (4537467)..(4537467): a, c, g or t
  modified_base (4538314)..(4538314): a, c, g or t
  modified_base (4538398)..(4538398): a, c, g or t
  modified_base (4538767)..(4538770): a, c, g or t
  modified_base (4538772)..(4538773): a, c, g or t
  modified_base (4538943)..(4538943): a, c, g or t
  modified_base (4538966)..(4538966): a, c, g or t
  modified_base (4542381)..(4542381): a, c, g or t
  modified_base (4542384)..(4542384): a, c, g or t
  modified_base (4542732)..(4542733): a, c, g or t
  modified_base (4545446)..(4545446): a, c, g or t
  modified_base (4548671)..(4548671): a, c, g or t
  modified_base (4551545)..(4551548): a, c, g or t
  modified_base (4554481)..(4554481): a, c, g or t
  modified_base (4556026)..(4556035): a, c, g or t
  modified_base (4556221)..(4556221): a, c, g or t
  modified_base (4556287)..(4556287): a, c, g or t
  modified_base (4556320)..(4556320): a, c, g or t
  modified_base (4556770)..(4556771): a, c, g or t
  modified_base (4556853)..(4556856): a, c, g or t
  modified_base (4556859)..(4556860): a, c, g or t
  modified_base (4556889)..(4556890): a, c, g or t
  modified_base (4556943)..(4556944): a, c, g or t
  modified_base (4557115)..(4557116): a, c, g or t
  modified_base (4557201)..(4557201): a, c, g or t
  modified_base (4557233)..(4557256): a, c, g or t
  modified_base (4557358)..(4557358): a, c, g or t
  modified_base (4558200)..(4558203): a, c, g or t
  modified_base (4558223)..(4558223): a, c, g or t
  modified_base (4559301)..(4559301): a, c, g or t
  modified_base (4559394)..(4559399): a, c, g or t
  modified_base (4559401)..(4559401): a, c, g or t
  modified_base (4559403)..(4559404): a, c, g or t
  modified_base (4559406)..(4559407): a, c, g or t
  modified_base (4559432)..(4559433): a, c, g or t
  modified_base (4559583)..(4559592): a, c, g or t
  modified_base (4559706)..(4559709): a, c, g or t
  modified_base (4559716)..(4559717): a, c, g or t
  modified_base (4559742)..(4559742): a, c, g or t
  modified_base (4559802)..(4559802): a, c, g or t
  modified_base (4561687)..(4561687): a, c, g or t
  modified_base (4568848)..(4568848): a, c, g or t
  modified_base (4568936)..(4568936): a, c, g or t
  modified_base (4569474)..(4569474): a, c, g or t
  modified_base (4571100)..(4571100): a, c, g or t
  modified_base (4571204)..(4571207): a, c, g or t
  modified_base (4571210)..(4571210): a, c, g or t
  modified_base (4571730)..(4571730): a, c, g or t
  modified_base (4573383)..(4573386): a, c, g or t
  modified_base (4574101)..(4574101): a, c, g or t
  modified_base (4574287)..(4574287): a, c, g or t
  modified_base (4574457)..(4574457): a, c, g or t
  modified_base (4581485)..(4581485): a, c, g or t
  modified_base (4583353)..(4583353): a, c, g or t
  modified_base (4586235)..(4586235): a, c, g or t
  modified_base (4588123)..(4588123): a, c, g or t
  modified_base (4588390)..(4588390): a, c, g or t
  modified_base (4594950)..(4594950): a, c, g or t
  modified_base (4597813)..(4597813): a, c, g or t
  modified_base (4598154)..(4598154): a, c, g or t
  modified_base (4598219)..(4598219): a, c, g or t
  modified_base (4599388)..(4599393): a, c, g or t
  modified_base (4600518)..(4600518): a, c, g or t
  modified_base (4602868)..(4602869): a, c, g or t
  modified_base (4603707)..(4603707): a, c, g or t
  modified_base (4603745)..(4603745): a, c, g or t
  modified_base (4604137)..(4604141): a, c, g or t
  modified_base (4604767)..(4604767): a, c, g or t
  modified_base (4605228)..(4605243): a, c, g or t
  modified_base (4605248)..(4605248): a, c, g or t
  modified_base (4605351)..(4605351): a, c, g or t
  modified_base (4605462)..(4605462): a, c, g or t
  modified_base (4605629)..(4605629): a, c, g or t
  modified_base (4605637)..(4605661): a, c, g or t
  modified_base (4605860)..(4605860): a, c, g or t
  modified_base (4606676)..(4606676): a, c, g or t
  modified_base (4606739)..(4606739): a, c, g or t
  modified_base (4607002)..(4607011): a, c, g or t
  modified_base (4607131)..(4607131): a, c, g or t
  modified_base (4618531)..(4618531): a, c, g or t
  modified_base (4620266)..(4620266): a, c, g or t
  modified_base (4621596)..(4621596): a, c, g or t
  modified_base (4623219)..(4623219): a, c, g or t
  modified_base (4626818)..(4626818): a, c, g or t
  modified_base (4628031)..(4628031): a, c, g or t
  modified_base (4628270)..(4628278): a, c, g or t
  modified_base (4628760)..(4628760): a, c, g or t
  modified_base (4630259)..(4630259): a, c, g or t
  modified_base (4630262)..(4630262): a, c, g or t
  modified_base (4630290)..(4630290): a, c, g or t
  modified_base (4630335)..(4630335): a, c, g or t
  modified_base (4630352)..(4630352): a, c, g or t
  modified_base (4630363)..(4630363): a, c, g or t
  modified_base (4630387)..(4630387): a, c, g or t
  modified_base (4630454)..(4630454): a, c, g or t
  modified_base (4630471)..(4630471): a, c, g or t
  modified_base (4631267)..(4631267): a, c, g or t
  modified_base (4631792)..(4631795): a, c, g or t
  modified_base (4632635)..(4632641): a, c, g or t
  modified_base (4632841)..(4632841): a, c, g or t
  modified_base (4633122)..(4633122): a, c, g or t
  modified_base (4634836)..(4634836): a, c, g or t
  modified_base (4635592)..(4635592): a, c, g or t
  modified_base (4636546)..(4636546): a, c, g or t
  modified_base (4636930)..(4636930): a, c, g or t
  modified_base (4636974)..(4636977): a, c, g or t
  modified_base (4638811)..(4638811): a, c, g or t
  modified_base (4638813)..(4638817): a, c, g or t
  modified_base (4639146)..(4639146): a, c, g or t
  modified_base (4639148)..(4639148): a, c, g or t
  modified_base (4640127)..(4640127): a, c, g or t
  modified_base (4640811)..(4640811): a, c, g or t
  modified_base (4641710)..(4641710): a, c, g or t
  modified_base (4642331)..(4642331): a, c, g or t
  modified_base (4642888)..(4642888): a, c, g or t
  modified_base (4643741)..(4643747): a, c, g or t
  modified_base (4644068)..(4644068): a, c, g or t
  modified_base (4644475)..(4644475): a, c, g or t
  modified_base (4644483)..(4644484): a, c, g or t
  modified_base (4644490)..(4644494): a, c, g or t
  modified_base (4644615)..(4644615): a, c, g or t
  modified_base (4644632)..(4644635): a, c, g or t
  modified_base (4644885)..(4644885): a, c, g or t
  modified_base (4644949)..(4644951): a, c, g or t
  modified_base (4644954)..(4644957): a, c, g or t
  modified_base (4645067)..(4645067): a, c, g or t
  modified_base (4645154)..(4645154): a, c, g or t
  modified_base (4645223)..(4645223): a, c, g or t
  modified_base (4645231)..(4645231): a, c, g or t
  modified_base (4645239)..(4645240): a, c, g or t
  modified_base (4645259)..(4645259): a, c, g or t
  modified_base (4645357)..(4645358): a, c, g or t
  modified_base (4645643)..(4645643): a, c, g or t
  modified_base (4645774)..(4645774): a, c, g or t
  modified_base (4645778)..(4645778): a, c, g or t
  modified_base (4645860)..(4645860): a, c, g or t
  modified_base (4646048)..(4646048): a, c, g or t
  modified_base (4646237)..(4646238): a, c, g or t
  modified_base (4646241)..(4646242): a, c, g or t
  modified_base (4646244)..(4646245): a, c, g or t
  modified_base (4646249)..(4646250): a, c, g or t
  modified_base (4646258)..(4646268): a, c, g or t
  modified_base (4646362)..(4646372): a, c, g or t
  modified_base (4646473)..(4646473): a, c, g or t
  modified_base (4646527)..(4646528): a, c, g or t
  modified_base (4646715)..(4646716): a, c, g or t
  modified_base (4646726)..(4646729): a, c, g or t
  modified_base (4646731)..(4646733): a, c, g or t
  modified_base (4646736)..(4646737): a, c, g or t
  modified_base (4646739)..(4646740): a, c, g or t
  modified_base (4646763)..(4646763): a, c, g or t
  modified_base (4646773)..(4646773): a, c, g or t
  modified_base (4647115)..(4647115): a, c, g or t
  modified_base (4647256)..(4647259): a, c, g or t
  modified_base (4647336)..(4647336): a, c, g or t
  modified_base (4647339)..(4647346): a, c, g or t
  modified_base (4647349)..(4647349): a, c, g or t
  modified_base (4647982)..(4647982): a, c, g or t
  modified_base (4648148)..(4648148): a, c, g or t
  modified_base (4648243)..(4648243): a, c, g or t
  modified_base (4648275)..(4648275): a, c, g or t
  modified_base (4648297)..(4648297): a, c, g or t
  modified_base (4651015)..(4651015): a, c, g or t
  modified_base (4653034)..(4653034): a, c, g or t
  modified_base (4656893)..(4656893): a, c, g or t
  modified_base (4656899)..(4656899): a, c, g or t
  modified_base (4657711)..(4657711): a, c, g or t
  modified_base (4657713)..(4657713): a, c, g or t
  modified_base (4658388)..(4658392): a, c, g or t
  modified_base (4659301)..(4659301): a, c, g or t
  modified_base (4659813)..(4659813): a, c, g or t
  modified_base (4662261)..(4662270): a, c, g or t
  modified_base (4663527)..(4663533): a, c, g or t
  modified_base (4664404)..(4664411): a, c, g or t
  modified_base (4664421)..(4664421): a, c, g or t
  modified_base (4669178)..(4669178): a, c, g or t
  modified_base (4670193)..(4670196): a, c, g or t
  modified_base (4670344)..(4670344): a, c, g or t
  modified_base (4671254)..(4671254): a, c, g or t
  modified_base (4671824)..(4671826): a, c, g or t
  modified_base (4673089)..(4673089): a, c, g or t
  modified_base (4675090)..(4675090): a, c, g or t
  modified_base (4677206)..(4677206): a, c, g or t
  modified_base (4678188)..(4678188): a, c, g or t
  modified_base (4679677)..(4679677): a, c, g or t
  modified_base (4679996)..(4679996): a, c, g or t
  modified_base (4680252)..(4680252): a, c, g or t
  modified_base (4681440)..(4681440): a, c, g or t
  modified_base (4681510)..(4681510): a, c, g or t
  modified_base (4685923)..(4685923): a, c, g or t
  modified_base (4686494)..(4686494): a, c, g or t
  modified_base (4687469)..(4687469): a, c, g or t
  modified_base (4691197)..(4691200): a, c, g or t
  modified_base (4691767)..(4691767): a, c, g or t
  modified_base (4691973)..(4691973): a, c, g or t
  modified_base (4692301)..(4692305): a, c, g or t
  modified_base (4692542)..(4692553): a, c, g or t
  modified_base (4693608)..(4693614): a, c, g or t
  modified_base (4695026)..(4695026): a, c, g or t
  modified_base (4695238)..(4695238): a, c, g or t
  modified_base (4696932)..(4696932): a, c, g or t
  modified_base (4696949)..(4696949): a, c, g or t
  modified_base (4699645)..(4699645): a, c, g or t
  modified_base (4701250)..(4701250): a, c, g or t
  modified_base (4701645)..(4701645): a, c, g or t
  modified_base (4702918)..(4702918): a, c, g or t
  modified_base (4702930)..(4702933): a, c, g or t
  modified_base (4702937)..(4702938): a, c, g or t
  modified_base (4704254)..(4704254): a, c, g or t
  modified_base (4704830)..(4704830): a, c, g or t
  modified_base (4704944)..(4704944): a, c, g or t
  modified_base (4705360)..(4705363): a, c, g or t
  modified_base (4706472)..(4706472): a, c, g or t
  modified_base (4706860)..(4706860): a, c, g or t
  modified_base (4709924)..(4709924): a, c, g or t
  modified_base (4710191)..(4710195): a, c, g or t
  modified_base (4712026)..(4712026): a, c, g or t
  modified_base (4714400)..(4714400): a, c, g or t
  modified_base (4715141)..(4715144): a, c, g or t
  modified_base (4715349)..(4715349): a, c, g or t
  modified_base (4716112)..(4716112): a, c, g or t
  modified_base (4716835)..(4716835): a, c, g or t
  modified_base (4716944)..(4716956): a, c, g or t
  modified_base (4716958)..(4716958): a, c, g or t
  modified_base (4718015)..(4718015): a, c, g or t
  modified_base (4718292)..(4718294): a, c, g or t
  modified_base (4721666)..(4721666): a, c, g or t
  modified_base (4726503)..(4726503): a, c, g or t
  modified_base (4726525)..(4726525): a, c, g or t
  modified_base (4727190)..(4727190): a, c, g or t
  modified_base (4727625)..(4727628): a, c, g or t
  modified_base (4729704)..(4729704): a, c, g or t
  modified_base (4729894)..(4729894): a, c, g or t
  modified_base (4730404)..(4730404): a, c, g or t
  modified_base (4730790)..(4730790): a, c, g or t
  modified_base (4732839)..(4732839): a, c, g or t
  modified_base (4734617)..(4734617): a, c, g or t
  modified_base (4736408)..(4736408): a, c, g or t
  modified_base (4736893)..(4736894): a, c, g or t
  modified_base (4738377)..(4738377): a, c, g or t
  modified_base (4739858)..(4739859): a, c, g or t
  modified_base (4739862)..(4739862): a, c, g or t
  modified_base (4740175)..(4740190): a, c, g or t
  modified_base (4741711)..(4741712): a, c, g or t
  modified_base (4741715)..(4741717): a, c, g or t
  modified_base (4742996)..(4742996): a, c, g or t
  modified_base (4745736)..(4745736): a, c, g or t
  modified_base (4746833)..(4746833): a, c, g or t
  modified_base (4748007)..(4748007): a, c, g or t
  modified_base (4748092)..(4748092): a, c, g or t
  modified_base (4748104)..(4748104): a, c, g or t
  modified_base (4749654)..(4749657): a, c, g or t
  modified_base (4750216)..(4750216): a, c, g or t
  modified_base (4751378)..(4751381): a, c, g or t
  modified_base (4751483)..(4751487): a, c, g or t
  modified_base (4752733)..(4752733): a, c, g or t
  modified_base (4752908)..(4752908): a, c, g or t
  modified_base (4753551)..(4753554): a, c, g or t
  modified_base (4753831)..(4753831): a, c, g or t
  modified_base (4754330)..(4754330): a, c, g or t
  modified_base (4754542)..(4754543): a, c, g or t
  modified_base (4754821)..(4754821): a, c, g or t
  modified_base (4754995)..(4754995): a, c, g or t
  modified_base (4755290)..(4755293): a, c, g or t
  modified_base (4755845)..(4755848): a, c, g or t
  modified_base (4756004)..(4756007): a, c, g or t
  modified_base (4757654)..(4757654): a, c, g or t
  modified_base (4757656)..(4757656): a, c, g or t
  modified_base (4757676)..(4757676): a, c, g or t
  modified_base (4757680)..(4757680): a, c, g or t
  modified_base (4758871)..(4758874): a, c, g or t
  modified_base (4759066)..(4759066): a, c, g or t
  modified_base (4759254)..(4759255): a, c, g or t
  modified_base (4759755)..(4759759): a, c, g or t
  modified_base (4759908)..(4759909): a, c, g or t
  modified_base (4761954)..(4761961): a, c, g or t
  modified_base (4761963)..(4761964): a, c, g or t
  modified_base (4761968)..(4761969): a, c, g or t
  modified_base (4762341)..(4762341): a, c, g or t
  modified_base (4762838)..(4762838): a, c, g or t
  modified_base (4769207)..(4769208): a, c, g or t
  modified_base (4769218)..(4769251): a, c, g or t
  modified_base (4769255)..(4769256): a, c, g or t
  modified_base (4769270)..(4769271): a, c, g or t
  modified_base (4769280)..(4769290): a, c, g or t
  modified_base (4769294)..(4769295): a, c, g or t
  modified_base (4769297)..(4769300): a, c, g or t
  modified_base (4774614)..(4774614): a, c, g or t
  modified_base (4781007)..(4781016): a, c, g or t
  modified_base (4781113)..(4781113): a, c, g or t
  modified_base (4781117)..(4781117): a, c, g or t
  modified_base (4782781)..(4782781): a, c, g or t
  modified_base (4783224)..(4783224): a, c, g or t
  modified_base (4783571)..(4783575): a, c, g or t
  modified_base (4783760)..(4783760): a, c, g or t
  modified_base (4785295)..(4785295): a, c, g or t
  modified_base (4786260)..(4786260): a, c, g or t
  modified_base (4786512)..(4786512): a, c, g or t
  modified_base (4789280)..(4789280): a, c, g or t
  modified_base (4789840)..(4789840): a, c, g or t
  modified_base (4795881)..(4795884): a, c, g or t
  modified_base (4797539)..(4797539): a, c, g or t
  modified_base (4801406)..(4801406): a, c, g or t
  modified_base (4802288)..(4802288): a, c, g or t
  modified_base (4803240)..(4803259): a, c, g or t
  modified_base (4809295)..(4809295): a, c, g or t
  modified_base (4809566)..(4809566): a, c, g or t
  modified_base (4810662)..(4810662): a, c, g or t
  modified_base (4811126)..(4811126): a, c, g or t
  modified_base (4814450)..(4814450): a, c, g or t
  modified_base (4815583)..(4815583): a, c, g or t
  modified_base (4815680)..(4815680): a, c, g or t
  modified_base (4816208)..(4816208): a, c, g or t
  modified_base (4816350)..(4816350): a, c, g or t
  modified_base (4816853)..(4816860): a, c, g or t
  modified_base (4816862)..(4816863): a, c, g or t
  modified_base (4817509)..(4817509): a, c, g or t
  modified_base (4817578)..(4817578): a, c, g or t
  modified_base (4818391)..(4818391): a, c, g or t
  modified_base (4820264)..(4820264): a, c, g or t
  modified_base (4821794)..(4821794): a, c, g or t
  modified_base (4821959)..(4821959): a, c, g or t
  modified_base (4829179)..(4829179): a, c, g or t
  modified_base (4831182)..(4831185): a, c, g or t
  modified_base (4834111)..(4834111): a, c, g or t
  modified_base (4834127)..(4834129): a, c, g or t
  modified_base (4834277)..(4834277): a, c, g or t
  modified_base (4834343)..(4834365): a, c, g or t
  modified_base (4834379)..(4834380): a, c, g or t
  modified_base (4834384)..(4834401): a, c, g or t
  modified_base (4834458)..(4834459): a, c, g or t
  modified_base (4834482)..(4834483): a, c, g or t
  modified_base (4836403)..(4836403): a, c, g or t
  modified_base (4837372)..(4837373): a, c, g or t
  modified_base (4839202)..(4839202): a, c, g or t
  modified_base (4839936)..(4839936): a, c, g or t
  modified_base (4841162)..(4841165): a, c, g or t
  modified_base (4846438)..(4846438): a, c, g or t
  modified_base (4846569)..(4846569): a, c, g or t
  modified_base (4847843)..(4847843): a, c, g or t
  modified_base (4848221)..(4848221): a, c, g or t
  modified_base (4849385)..(4849389): a, c, g or t
  modified_base (4849922)..(4849922): a, c, g or t
  modified_base (4850412)..(4850412): a, c, g or t
  modified_base (4850715)..(4850715): a, c, g or t
  modified_base (4851226)..(4851226): a, c, g or t
  modified_base (4851326)..(4851326): a, c, g or t
  modified_base (4851907)..(4851908): a, c, g or t
  modified_base (4852206)..(4852207): a, c, g or t
  modified_base (4853174)..(4853174): a, c, g or t
  modified_base (4854395)..(4854395): a, c, g or t
  modified_base (4854397)..(4854403): a, c, g or t
  modified_base (4854794)..(4854794): a, c, g or t
  modified_base (4855537)..(4855537): a, c, g or t
  modified_base (4856489)..(4856493): a, c, g or t
  modified_base (4857233)..(4857239): a, c, g or t
  modified_base (4859517)..(4859517): a, c, g or t
  modified_base (4861585)..(4861585): a, c, g or t
  modified_base (4862502)..(4862502): a, c, g or t
  modified_base (4863195)..(4863196): a, c, g or t
  modified_base (4866323)..(4866323): a, c, g or t
  modified_base (4869325)..(4869331): a, c, g or t
  modified_base (4873121)..(4873121): a, c, g or t
  modified_base (4876971)..(4876971): a, c, g or t
  modified_base (4877861)..(4877861): a, c, g or t
  modified_base (4882229)..(4882229): a, c, g or t
  modified_base (4882642)..(4882642): a, c, g or t
  modified_base (4883418)..(4883419): a, c, g or t
  modified_base (4883426)..(4883427): a, c, g or t
  modified_base (4883617)..(4883617): a, c, g or t
  modified_base (4883620)..(4883620): a, c, g or t
  modified_base (4886094)..(4886094): a, c, g or t
  modified_base (4888352)..(4888352): a, c, g or t
  modified_base (4888354)..(4888354): a, c, g or t
  modified_base (4888573)..(4888573): a, c, g or t
  modified_base (4889474)..(4889476): a, c, g or t
  modified_base (4896925)..(4896925): a, c, g or t
  modified_base (4903073)..(4903073): a, c, g or t
  modified_base (4906721)..(4906721): a, c, g or t
  modified_base (4906736)..(4906736): a, c, g or t
  modified_base (4906757)..(4906757): a, c, g or t
  modified_base (4907189)..(4907189): a, c, g or t
  modified_base (4908415)..(4908421): a, c, g or t
  modified_base (4908590)..(4908590): a, c, g or t
  modified_base (4910844)..(4910844): a, c, g or t
  modified_base (4912269)..(4912281): a, c, g or t
  modified_base (4912316)..(4912316): a, c, g or t
  modified_base (4912957)..(4912957): a, c, g or t
  modified_base (4914525)..(4914525): a, c, g or t
  modified_base (4915920)..(4915920): a, c, g or t
  modified_base (4918164)..(4918164): a, c, g or t
  modified_base (4918193)..(4918193): a, c, g or t
  modified_base (4919475)..(4919475): a, c, g or t
  modified_base (4919709)..(4919709): a, c, g or t
  modified_base (4919711)..(4919714): a, c, g or t
  modified_base (4919718)..(4919738): a, c, g or t
  modified_base (4919742)..(4919743): a, c, g or t
  modified_base (4919765)..(4919766): a, c, g or t
  modified_base (4919770)..(4919771): a, c, g or t
  modified_base (4920740)..(4920740): a, c, g or t
  modified_base (4922747)..(4922747): a, c, g or t
  modified_base (4922890)..(4922890): a, c, g or t
  modified_base (4929724)..(4929724): a, c, g or t
  modified_base (4931331)..(4931331): a, c, g or t
  modified_base (4933181)..(4933181): a, c, g or t
  modified_base (4934740)..(4934741): a, c, g or t
  modified_base (4935387)..(4935387): a, c, g or t
  modified_base (4936631)..(4936639): a, c, g or t
  modified_base (4936671)..(4936673): a, c, g or t
  modified_base (4936675)..(4936675): a, c, g or t
  modified_base (4937008)..(4937008): a, c, g or t
  modified_base (4937066)..(4937066): a, c, g or t
  modified_base (4937691)..(4937691): a, c, g or t
  modified_base (4940942)..(4940942): a, c, g or t
  modified_base (4944373)..(4944379): a, c, g or t
  modified_base (4951563)..(4951564): a, c, g or t
  modified_base (4953804)..(4953804): a, c, g or t
  modified_base (4954702)..(4954702): a, c, g or t
  modified_base (4966953)..(4966953): a, c, g or t
  modified_base (4967260)..(4967260): a, c, g or t
  modified_base (4967440)..(4967440): a, c, g or t
  modified_base (4967542)..(4967542): a, c, g or t
  modified_base (4967621)..(4967621): a, c, g or t
  modified_base (4967849)..(4967849): a, c, g or t
  modified_base (4968478)..(4968481): a, c, g or t
  modified_base (4969535)..(4969535): a, c, g or t
  modified_base (4973136)..(4973136): a, c, g or t
  modified_base (4973607)..(4973607): a, c, g or t
  modified_base (4973614)..(4973615): a, c, g or t
  modified_base (4974514)..(4974514): a, c, g or t
  modified_base (4974537)..(4974537): a, c, g or t
  modified_base (4974570)..(4974570): a, c, g or t
  modified_base (4974586)..(4974586): a, c, g or t
  modified_base (4975554)..(4975606): a, c, g or t
  modified_base (4976482)..(4976482): a, c, g or t
  modified_base (4976644)..(4976647): a, c, g or t
  modified_base (4976653)..(4976654): a, c, g or t
  modified_base (4979874)..(4979874): a, c, g or t
  modified_base (4985639)..(4985639): a, c, g or t
  modified_base (4987280)..(4987280): a, c, g or t
  modified_base (4987385)..(4987385): a, c, g or t
  modified_base (4987396)..(4987396): a, c, g or t
  modified_base (4988127)..(4988132): a, c, g or t
  modified_base (4989566)..(4989567): a, c, g or t
  modified_base (4991569)..(4991569): a, c, g or t
  modified_base (4993896)..(4993896): a, c, g or t
  modified_base (4993898)..(4993899): a, c, g or t
  modified_base (4995272)..(4995272): a, c, g or t
  modified_base (4996029)..(4996029): a, c, g or t
  modified_base (4999074)..(4999074): a, c, g or t
  modified_base (5002571)..(5002572): a, c, g or t
  modified_base (5002845)..(5002845): a, c, g or t
  modified_base (5004849)..(5004849): a, c, g or t
  modified_base (5005001)..(5005001): a, c, g or t
  modified_base (5005448)..(5005449): a, c, g or t
  modified_base (5005753)..(5005753): a, c, g or t
  modified_base (5006149)..(5006153): a, c, g or t
  modified_base (5007387)..(5007387): a, c, g or t
  modified_base (5009336)..(5009336): a, c, g or t
  modified_base (5010081)..(5010081): a, c, g or t
  modified_base (5010759)..(5010760): a, c, g or t
  modified_base (5010762)..(5010775): a, c, g or t
  modified_base (5011377)..(5011377): a, c, g or t
  modified_base (5022286)..(5022287): a, c, g or t
  modified_base (5022289)..(5022292): a, c, g or t
  modified_base (5026645)..(5026645): a, c, g or t
  modified_base (5028789)..(5028789): a, c, g or t
  modified_base (5029183)..(5029183): a, c, g or t
  modified_base (5031014)..(5031014): a, c, g or t
  modified_base (5031763)..(5031763): a, c, g or t
  modified_base (5033384)..(5033384): a, c, g or t
  modified_base (5033390)..(5033390): a, c, g or t
  modified_base (5042026)..(5042029): a, c, g or t
  modified_base (5042314)..(5042315): a, c, g or t
  modified_base (5047795)..(5047798): a, c, g or t
  modified_base (5047928)..(5047933): a, c, g or t
  modified_base (5050187)..(5050187): a, c, g or t
  modified_base (5050190)..(5050191): a, c, g or t
  modified_base (5050221)..(5050221): a, c, g or t
  modified_base (5050224)..(5050224): a, c, g or t
  modified_base (5050288)..(5050288): a, c, g or t
  modified_base (5051195)..(5051195): a, c, g or t
  modified_base (5051586)..(5051592): a, c, g or t
  modified_base (5051601)..(5051601): a, c, g or t
  modified_base (5051915)..(5051915): a, c, g or t
  modified_base (5053615)..(5053617): a, c, g or t
  modified_base (5053807)..(5053807): a, c, g or t
  modified_base (5057347)..(5057347): a, c, g or t
  modified_base (5057940)..(5057946): a, c, g or t
  modified_base (5058034)..(5058034): a, c, g or t
  modified_base (5060175)..(5060175): a, c, g or t
  modified_base (5060281)..(5060281): a, c, g or t
  modified_base (5060562)..(5060562): a, c, g or t
  modified_base (5060675)..(5060675): a, c, g or t
  modified_base (5063785)..(5063787): a, c, g or t
  modified_base (5068547)..(5068547): a, c, g or t
  modified_base (5068600)..(5068600): a, c, g or t
  modified_base (5068606)..(5068606): a, c, g or t
  modified_base (5068613)..(5068617): a, c, g or t
  modified_base (5071057)..(5071060): a, c, g or t
  modified_base (5071934)..(5071934): a, c, g or t
  modified_base (5072001)..(5072001): a, c, g or t
  modified_base (5072903)..(5072903): a, c, g or t
  modified_base (5073101)..(5073101): a, c, g or t
  modified_base (5074263)..(5074271): a, c, g or t
  modified_base (5075370)..(5075371): a, c, g or t
  modified_base (5075373)..(5075376): a, c, g or t
  modified_base (5075388)..(5075389): a, c, g or t
  modified_base (5075434)..(5075445): a, c, g or t
  modified_base (5075575)..(5075578): a, c, g or t
  modified_base (5075584)..(5075584): a, c, g or t
  modified_base (5075822)..(5075825): a, c, g or t
  modified_base (5075889)..(5075890): a, c, g or t
  modified_base (5076338)..(5076338): a, c, g or t
  modified_base (5076354)..(5076356): a, c, g or t
ttgctcaagcagtttggcaagtacagcggcatcaataccagggatcggaataaaagagccaatacggaacacaatcagcgcaccgataacaaacagcagtctgcgtttcagctcgcctaagccacctttggcactttgaaaatctaatcccggttgtttagccatctgctacttattcctcgattttaccgccagcagcttcgatagcagcacgagcgcctttagtaacacgcaggccacgaacagttaccggagtcgttacttcgccagccaggatcactttcgcgaactcgatctggataccgataatgttagccgctttcagcgtgttcaggtctactacaccgccttctactttagccaggtcagacagacgaacttcggctgtaatcgctgctttacgagaagtgaagccgaatttcggcagacgacggtacagaggcatctgaccaccctcgaaaccgcgacgtacgccaccgccagaacgagacttctgacctttgtgaccacgaccaccggttttaccgaggccagaaccgataccacgacccaggcgtttacccgcctttttggagccttcggccggagacagagtatttaaacgcatctcttactcctcaactttaaccatgaaggaaaccgcgttgatcataccgcgaatagcaggagtatcctcgcgctctacggtgtgaccaatacgacgcagacccaggccaagcagcgttgccttgtgtttcggcagacgaccgattgcactgcgggtttgagtaattttaatagtctttgccatggtttatttccccagaatttcttcaacggatttaccacgcttggcagcgaccatttctggagaattcatattttccaggccatcaatagttgcacgaaccacgttgatcgggttggtggaaccatatgctttagccagaacgttatgaaccccagcgacttccagaacggcgcgcattgcaccaccggcgatgataccggtaccttcggaagccggctgcatgaatacgcgagaacccgtgtgaacacctttaacagggtgttgcagagtgccgttattcagcgcgacgttaatcatattgcgacgggctttttccatcgctttctggatcgctgctggaacttcacgcgctttaccgtaaccaaaaccaacgcgaccgttaccatcgccaactacagtcagagctgtgaaggagaaaatacgaccacctttaacggttttagatacgcggtttaccgcgatcagcttttcctgcagttcgccagcttgtttttcgatgtgagccatcttacacctctaccttagaactgaaggccagcttcacgggcagcatctgccagtgcctggacacgaccatgatattggaacccggaacggtcaaaggatacatctttgatgcctttttccagagcgcgttcagcgacagctttacccacagctgcagccgcgtctttgttaccggtgtacttcagttgttcagcgatagctttttctacagtagaagcagctaccagaacttcagaaccgttcggtgcaattacctgtgcgtaaatgtgacgcggggtacgatgtaccaccaggcgagttgcgcccagctcctggagcttgcggcgtgcgcgggtcgcacgacggatacgagcagatttcttatccatagtgttaccttacttcttcttagcctctttggtacgcacgacttcgtcggcgtaacgaacacccttgcctttataaggctcaggacgacggtaggcgcgcagatccgctgcaacctggccgatcacctgcttatcagcgcctttcagcacgatttcagtctgagtcggacattcagcagtgatacccgcaggcagctgatggtcaacaggatgagagaaacccagagacaggttaatcacattgcctttaaccgctgcacggtaacctacaccaaccagctgcagcttcttagtgaagccttcggtaacaccgataaccattgagttcagcagggcacgcgcggtaccagcctgtgcccaaccgtctgcgtaaccatcacgcggaccgaaggtcagggtattatctgcatgtttaacttcaacagcatcgttgagagtacgagtcagctcgccgtttttacctttgatcgtaataacctgaccgttgatttttacgtcaacgccggcaggaacaacgaccggtgctttagcaacacgagacattttttcctccgattaggctacgtagcagataatttcgccaccaagaccagcctggcgcgctgcacgatcagtcataacacctttagaggtagaaacaactgcgatacccagacccgccataactttcggcagctcatctttacgtttatagatgcgcagacctgggcggctgacacgctgaatgctttctacaacagctttgccctggaaatacttcagagtaagttccagttcaggcttggtgtcgccttcaactttaaaatcttcaataaaaccttcttccttcagcacgttggcgattgccactttcagcttggaggaaggcatggtgaccgcagctttgttcgcggcctgaccgttacggatacgggtcagcatatccgcgatcggatcttgcatgctcatctgtctttactcccgtgattcaattggtgacaattaccagctagcctttttcagacccgggatttcaccgcgcatagcggcttcacggaccttaatacggctcaacccgaacttccgcaggaaaccatgcggacgacctgtttgacggcagcggttacgctgacgagacgggctggaatcacgcggcagagtctgcagcttgagaacagcgttccaacgatcttcgtcggaagcgttcacatcagagatgatcgctttcagttcagcgcgtttcgcgaagtatttatcagctaaagctacgcgttttacttcgcgtgctttcattgattgcttagccatttagtaaccctaccttacttgcggaacgggaagtcaaaggcagccagcagagcgcggccttcttcgtcagatttcgcagtagtggtaatggtaatatccaaaccacgaacgcggtcgactttatcgtagtcgatttctgggaagatgatctgctcacggacacccatgctgtagttaccacgaccgtcgaaagacttagcggacaggccacggaagtcacggatacgaggtacagcaatagtgatcaggcgctcaaagaactcccacatgcgttcgccacgcagagttactttacagccgatcggatagccctgacggattttgaagcctgcaacagatttgcgtgctttggtgatcagcggtttttgaccggagattgctgccaggtctgctgctgcgttatccagcagttttttgtcagcgatcgcttcaccaacacccatgttcagggtgatcttctcgacccgagggacttgcatgacagaattgtagttaaactcagtcatgagttttttaactacttcgtctttgtagtaatcatgcagtttcgccatcgtactactccaaattacttgatagtttcgctgttagacttgaagaaacggacttttttgccgtcttcgaatctaaagcctacacggtcagccttgccggttgccgcattgaagattgctacgttggaaacctgaatagcggcttctttttcaacgatgccacccggttggttcagggccggaaccggcttctgatgtttcttaaccaggttgataccttcaacaatgaccttgccggaagacaggacattcttaactttaccgcgtttacctttatctttaccggttaacacgataacttcgtcatcacgacggattttcgctgccatgattcgctccttagagtacttctggtgccagagagataattttcatgaacttctcactacgaagctcacgagttaccggcccaaaaatacgcgtaccgataggctgctcgctgttgttgttcagaagaacacaagcattaccatcgaagcgaatgacagaaccgtccgggcgacgaacacccttcttggtgcgcaccactaccgccttcagcacatcaccttttttgaccttaccacgcggaattgcttctttgatggtgatcttgatgatgtcgcctacgcctgcgtagcgacggtgcgagccacccagaaccttgatacacattacgcgacgtgcaccggagttgtcggcgacgttcagcatagtctgttcttggatcattttagtgctccgctaatgtcaactactactgagacccgaaaatcaggtcgttaaaaatccccatatcgagggcgcggcattataacaccgcttcaaggatatgggtagaaaaaataaacggctcatttctgagccgtttattcgtatcgagagagtgtactgtattacagaaccgctttctctacaacgcgaaccagcgtccaggatttagtcttggacagcggacggcattcgcggatttcaaccacgtcaccgataccgcattcgttgttctcgtcatgtacgtgcagtttggtcgtacgcttgatgaatttaccgtagatcgggtgtttcacaaaacgttcgatagcaacaacaatggatttctccattttgtcgctaacaacgcgaccttgcagagtacggattttatcggtcattacgcacccgccttctcgttcagtaaagtcttaacgcgtgcgacatcgcgacgcacttgcttcaacaggtgagactgttgcagctggccacttgcagcctgcatacgcaggttgaactgctcacgcagcaggttcagcagctcggtgttcagctcttcaacgctcttctcacgcagctcttttgctttcattacatcaccgtcttagttacaaaggtggttttaatcggcagtttcgctgctgccagcttgaatgcttcacgggccagctcttccggaacaccgtccatttcatacaggactttacccggctgaatcaaggcaacccaatactccacgttacctttacctttacccatacgcactgccagcggcttttcagtgatcggtttgtccgggaacacacggatccagatcttaccttgacgcttaactgcacgggtcatagcacgacgtgctgcttcgatctgacgggcagtcagacgaccacggccaacagctttcagaccgaagctgccgaagctaacatccgtaccctgcgccagaccgcggttacggcctttatgcattttacggaattttgtacgctttggttgtaacatcagcgacgctccttatttacggcctttacgctgctgctttttaggctgagcagccggtttttccggttgttcaacagcagccataccacccaggatctcgcctttgaagatccacactttaacgccgattacaccgtaagtggtgtgcgcttcagaggtgttgtagtcgatgtcagcacgcagagtgtgcagcggtacgcgacnttcgcggtaccattcggtacgtgcgatttccgcgccgcccagacggccgctaacttcaactttaatacctttagcgcccagacgcattgcgttctgtacagcacgcttcatagcacgacggaacataacgcgacgttccagctgagaagtgatgctgtcagcaaccagttttgcgtccagttcaggcttacgaacttcggcgatgttgatctgtgcaggaacgccagcgatgtccgctacgaccttacgcagtttttctacgtcttcaccttttttaccgataacgatacccgggcgagcagtgtgaatggttacacggatgctcttagccggacgctcgataacgatacgagatacggacgctttagccagttccttagtcaggtactgacgtactttaaaatcgctgtccaggttgtcagcgaattctttggtgttcgcaaaccaggtagagttccatggttttacaatacccaggcgaataccattaggatgtactttctgacccattgctagtctccagagtctcagcgatcggacacaaccacagtgatgtggctggtgcgcttcaggatgcgatctgcacgaccttttgcacgcggcataatgcgcttcatgctcgggccttcgtctacgaaaattttcgtaactttcagatcgtcaatgtcagcgccatcgttgtgttcagcgttagcaatggcagattccagaactttcttgaccagtacagccgctttcttgttggtgtaggtcaaaatatccagagcctgcgacactttcttaccgcgaatcaggtcagcaacaaggcgaaccttctgagcagaagaacgagcatggcgatgtttagcgatagtttccatctcttcctcctaccttatttcttcttcgcttttttatcagcagcgtggccgcgataagtacgagtcggtgcgaattcacccagtttgtgaccgaccatttcgtcggttacaaataccggaacgtgctgacgaccattatggacagcgatggtcaaaccgatcatgttaggaaagatcgttgaacgacgggaccaagtgcgcaggggcttcttgtctccgctttccaccgctttctctaccttcttcagcaagtgcaggtcaataanaggacctttcttgagagaacgtggcatggcttatcctctaaaattatttgctacggcgacgtacgatgaatttatcagtacgcttgttgctgcgggtcttcttacctttggtctgaacgccccacggagttaccgggtgcttaccaaagttacgaccttcaccaccaccatgtgggtggtctaccgggttcatcgcggtaccgcgaacggtcggacgaacaccacgccagcgtgcagcacctgctttacccagaacgcgcagcatatgctcagcattgccaacttcgcccagagttgcacggcagtctgcttcgactttacgcatttcaccagaacgcagacgcagggtgacataagcaccgtcgcgagcaacgatctgaacgtaagtaccagcggaacgtgccagctgaccgcctttacctggtttcatttctacgttatgaacagtagaaccaaccgggatgttgcgcatcggcagggtgttgcctggtttgattgcagcatcaacgccagactgaatctggtcgccagctttcaggcctttaggggccaggatgtaacggcgttcaccgtctttgtacagaaccagcgcgatgttcgcggaacggttcggatcgtactcaagacgttcaacaactgccgggataccgtctttgttgcgtttgaagtcaacaatacggtaagcctgcttgtggccaccaccgatatgacgagtggtgatacggccattgttgttacgaccaccggatttgctgtttttttccagcaacggagcaaaaggtttgcccttgtgcagctcagggttaaccactttaactacgtggcgacgacccggagatgtcggtttacatttaacaactgccattgtattactcctccgacttactcagcgccgccaacgaagtccagattctggccttctttcagggtgacgtaagcttttttccagtcgctacgacgaccgatacgctgtccgtgacgtttaactttccctttaactaccagagtgttaacgacttcgacttcgacttcaaacagtttctgcacagcagctttgatttctgctttggtcgcgtctttagcaactttgagtacgatggtgttggatttttccatcgcagtagacgctttttcagaaacgtgcggtgcacgcagcaccttcagcagacgttcttcacgaatcatgccagcatctcctcaacttgcttaacagcatcagcagtcattacgactttgtcgaaggcgatcaggctaaccgggtcgataccagttgcatcgcgtacgtcaaccttgtgcaggttgcgcgcagccaggaacaggttttcgtccagctcaccggtgatgatcagcacatcttccagagccatgtctttcagtttctgtgccagcagcttagttttcggcgcttctacagagaacttctcgacaacgatcagacgatcctgacgtaccagttcggacaggatgcttttcagcgcgccgcggtacatcttcttgttaactttttgactgtggtcctgcggacgagcagcaaaggtcacgccaccagaacgccagatcgggctcttgatagaaccagaacgcgcacggccggtgcctttctggcgccacggttttttaccggaaccagttacttcagcacgagtcttctgagcacgagtaccctgacgagcaccagctgcataagcaacaacaacctggtgaaccagcgcttcgttgaaatcacgaccgaaggtagtttcggaaacagtcagcgcgctctgcgcgtctttcaatactaattccattgctatctccttacgccttcacagctggtttaacgatcaggtcgctaccggttgcacccgggacagcacctttaaccagcagcaggttgcgctcagcgtcaacgcgtactacgtcaaggctctgaacggttacacgttcgttacccatctgacctgccattttcttgcctttgaacactttgcccggagtctggttctgaccgatagaacccggaacgcggtgagacaaggagttaccgtgagtagcgtcctgggtacggaagttccagcgcttaacggtacctgcgaaacctttacctttagaggtgccagttacgtcaacttttttaacgtcagcaaacagttcaacgctaatgctctgacctacagtgaactcttcgccttcagccaggcggaattcccacagaccacggccagcttctacgccagctttagcgaagtggccagcttcaggcttggtcacacggttagcttttttagcaccggtggtcacctgaatagcacggtagccatcgttagccaggtctttaacctgagtaacgcggtttgcttcaacttcgattacggttactgggatagaaacgccgtcttctgtgaagatacgggtcatacccacttttttaccgactaaaccaatcattgtttcaacctctcaatcgctcaatgacctgattaacccaggctgatctgcacgtctacaccggcagccagatccagacgcatcagagcatcaacggttttctcggttggctcaacgatgtcaaccagacgcaagtgagtacggatttcgtactgatcgcgcgcgtctttgttgacgtgcggggagatcagaacagtgaagcgctctttgcgtgtcggcagcgggatcggaccacggacctgcgcaccagtgcgcttggcagtctcgacgatttccgcggttgcttgatcgatcagacgatgatcaaacgctttcaggcggatacggattctttggttctgcatgagaccagagctccaattattttataaacgaaaatgattactcctcagacccattacgattgatgggagagtgtaaccgttcttacgtagctccccgattgggagcattgttaggtagccaaattcggctaactgaggttcagattgaacctgctgtcaactacgacaagcccgcgcattatacgcaaatctgagcctgacgcaagcatcgggcagaaattaatcgcaacgcgcagattgcgagctgcattccacgaaatttgtaaggttgtgaagatagcgtttttcaccggaatcaggttaacaaatcagcgctctctctgttgctgagcatccggagttattcgatggtgatactccaattacagaggatgttttatggacactacccttccctttctaattttgtacgcttgtttatcagccctactttttttctgggatgcaaagcatggcttgttacctgacagatttacgtgcccgttactctggtcaggtcttttgttctatcaagtttgtcatcctgatggtttagccgatgcgttatggggggcaattattggttacggcacattcgctgtcatttactgggggtatcgcatactgcgccataaagaaggattaggctatggtgatgtgaagtttctcgccgcccttggcgcctggcattcatgggccttcttaccacgactggttttccttgctgcctcattcgcttgcggagccgtagttattggtctgctcatgagnggaaaagaatcattaaaaaacccgctgccttttgggccatttctggcggctgcgggtttcgttataggctgggatagtttgctgataggccgttaatcattaactttaatttgtgattgcaggtaattttgtaggccgattttaccgatgagatccagttcagtttcgagccagtcgatatgaccttcttcatcggcaaggatctcgatcatcatatcgcggctaacatagtcatgaacgctgtcggcatacgcgatagcctcacgcagatccttcgcaccttccagctctaatcgcaggtcggattgcagcatctcttcgacatcttcaccgatccctagcttacctaaatcctgtaagttggggattccttctaaaaacaaaatacgctcgatatatttatcagcgtgtttcatctcatcgatggattcatggtattcgacgtcattaagacgcatcagtccccagtttttaaacatccgggcatggagaaaatactgattgattgcgacaagctcatttcccaatagtttattgagataatttatgattttaacatcacctttcattttatagtccctccgcttccactattagagcgtagatggggctagcgggatgtcaaaaaataagcgtgggcttcaggcaatctctttaaattctggcatctgcatcaactcgtcctgcatcacttcgcnnnnggcgcgaatgcacttaccacattgatttcccacaggaataaacttacgcaattgttggaaagattgcggatgaaactgacggactgcctggcgaatttttttgtcacttacaccattacacaaacaaacgtacatgattgctcccgttcaaattctgcgcaaagtgtaaatgagaatagttatgattacaatagcacagttttatttgcgccatagttcagcgagcaaaattacgactaaatatttcgagctcaaattacgggcagcaaaaannnnnnnnaagcgcccttttcaattcaaaactaattaacgtgtaattagcccagaactttagctacaacgcccgcgccaacggtacggccgccttcacggattgcgaaacgcagaccgtcgtccatcgcgatcgggtggatcagggtaacaaccattttgatgttgtcgcccggcattaccatctctacgccttccggcagttcgatggtaccagtcacgtcagtagtacggaagtagaactgcggacggtagcctttgaagaacggagtatgacggccgccttcatctttggacagaatgtacacttcagattcgaacttggtgtgcggcttgatggtgcccggcttagccagtacctgaccacgttcgatttcttcacgtttgataccacgcagcagaacacctacgttctcaccagcacggccttcgtccagcagtttgcggaacatttcaacgccagtacaggtagacttctgagtctctttgataccaacgatttcaacttcttcaccaactttgatgataccgcgttctacacgaccggtaacaacggtaccacgaccggagatggagaatacgtcttcgatcggcagcaggaacggcttgtcaattgcacgctctggttccggaatgtaggaatccaggaagccagccagttccaggattttcgcttcccactctgcgtcgccttccagcgctttcagagcagaaccacgaacgatcggagtgtcgtcgcccgggaagtcgtactgagacagaagttcacgaacttccatttcaaccagttccagcagctcttcgtcatcaaccatgtcgcatttgttcaggaacacgatgatgtacggaacgcctacctgacgacccagcaggatgtgctcacgagtctgcggcatcgggccgtcagtcgcagcaactaccaggatcgcgccgtccatctgagcagcaccggtgatcatgtttttaacatagtcggcgtgccccgggcagtctacgtgtgcgtagtgacgggtcggggtgtcatattcaacgtgagaagtgttgatggtgataccacgagctttttcttccggcgcgttatcgatctggtcgaatgcacgagcagcaccgccgtaggttttagccagtacggtggtgattgcagcggtcagagtagttttaccgtggtcaacgtggccgatagtaccaacgttaacgtgcggttttgtacgttcaaatttttctttagacacggctatattccttactatagtgctctccccttcaggagagagcacgggactttggtattaacccttaggcttatttaccacgggcttcaattacggcctgagcaacgttactcggcgcttcatcatacttcaggaattccatagtgtatgatgcacgacctttggtcagagaacgcagctgagttgcgtatccgaacatttcagacagcggtacttcagcgtggatcttaacgccagtaacttcagattcctgacctttgagcataccacgacgacggctcaagtcaccgataacgtcaccggtgttctcttccggagtttctacttcaaccttcatgatcggctcaagcagaactggtttcgctttcttaaagccttctttaaaggcgatagaagcagccagtttaaacgccagttcagaggagtcaacgtcatggtaagaaccgaagtgcagacgaatacccatgtctactaccgggtagcctgccagcggacctgctttcagctgttcctggatacctttatcaacggccgggatgtattcgccagggattacaccacctttaatgtcgttgatgaactcgtagcctttcgggtttgaacccggctccagcgggtacatgtcgataacaacatgaccatactgaccacgaccaccagactgtttcgcgtgtttaccttcaacatcggtaactttctggcggatagtttcacggtaagcaacctgcggtttacctacgttcgcttcaacgttgaattcacgcttcatacggtcaacgatgatgtcgaggtgcagttcgcccatacccgcaatgatggtctggttagattcttcgtcagtccatacacggaaagacgggtcttctttagccagacggcccagagccagacccattttttcctggtcagctttggttttcggttcaactgcgatggagattaccggctcagggaattccatacgttccagaatgatcggcgcatccgggtcacacagggtgtcaccagtggttacgtctttcagaccgatagcagcagcgatgtcgcccgcgcgaacttctttgatctcttcacgtttgttagcgtgcatctgaacgatacgaccgaaacgctcacgtgcagctttcacggagttcagtacggtatcaccagagttaaccacaccggagtaaacacggaagaaggtcaggttaccaacaaacgggtcggtagcgattttgaacgccagtgcagagaacggctcgtcatcacttgcgtgacgttcagccggagtgtctttaccgtcgtccaggataccgttgatcgcaggtacgtcaaccggggatggcaggtaatcaattaccgcatccagcatcgcctgaacacctttgttnttgaacgcagaaccacaggttaccaggatgatttcgttgttcagaacgcgctgacgcagagcacctttgatttctgcttcagtcagttcttcaccacccaggtatttttccatcagctcttcagaagcttcagctgcggattcgatcaggttctggtgccattcgttagccagttcaaccatgtctgccgggatatcttcgtattcgaaggttacgccctggtcagcgtcgttccagttgatagctttcattttcaccaggtcaacaacaccggtgaaatgttcttcagcaccaatcgccagctgcagcggaaccgggttcgcgcccagacgggttttgatctggttaacaactttcaggaagttcgcacccatacggtccattttgttaacgaacgcaatgcgcggaactttatatttgtttgcctgacgccatacggtttcagactgcggctgaacaccaccaactgcgcagtaaaccattaccgcaccatcgagcacacgcatggaacgttctacttcgattgtgaagtcaacgtgccccggggtgtcgatgatgttgatgcgatgcggctcatactgcttagccataccagaccagaatgcagtagtcgcagcggaagtgatggtaataccacgttcctgctcctgctccatccagtccatggttgcagcgccgtcatgaacttcaccgattttatggtttacaccggtgtagaacagaatacgttcggtagtagtggttttaccggcgtcgatgtgcgcactgataccgatgttacggtagcgtgcgatgggtgttgtacgagccatttgtttcctcgtttatcttttaggcgttcaatttaagtagcccaaagcgggctgcttactggaagcgcccgcctggtgactaaaactccgaagggattaccaacggtagtgtgcgaacgccttgttggcttcggccatacggtgaacgtcttcacgtttcttaactgcagtacctttgttttctgcagcatcagaaagttcgttcgccaggcgcagagccatggatttatcaccgcgtttacgagcagcttcaacgatccaacgcattgccagagcattacgacgaaccggacggacttcaactggtacctgataagtagaaccaccaacgcggcgagacttaacttctacagtcgggcgcacgttttcgagagctacttcgaatgcttccagttcagatttaccagagcgctgagccagggtctccagcgcgctgtatacgatagattcagcagtagattttttaccatctaccatcaggatatttacaaatttagccagcagttctgatccgaacttcggatccggcagaattttacgctgaccaatgacgcgacgacgtggcatggaaatactccgttgttaattcaggattgtccaaaactctacgagtttagtttgacatttaagttaaaacgtttggccttacttaacggagaaccattaagccttaggacgcttcacgccatacttggaacgagcctgcttacggtctttaacgccggagcagtcaagcgcaccacgtacggtgtggtaacgaacacccgggaggtctttaacacgaccgccacggatcaggatcacggagtgctcctgcaggttgtgaccttcaccaccgatgtaggaagtcacttcgaaaccgttagtcagacgaacacggcatactttacgcagcgcggagttcggttttttaggagtggtagtatatacacgagtacatacgccacgtttttgcgggcatgcttccagcgcaggcacgttgcttttcgcaactttgcgagcacgtggtttgcgtaccagctggttaactgttgccattaaatagctcctggttttagcttttgcttcgtaaacacgtaataaaacgtcctcacacaatatgaggacnccgaattttagggcgatgccgaaaaggtgtcaagaaatatacaacgatcccgccatcaccaggccatctggctggagtgcttaaccgtaagtctgacgaaatcagtatagtcaatgggaatgatgtcgttcgaaatttgaccagtcaaaccgcgggcaataaggtcttcgttcagggcatagaccttaatgggggcattacgcagactttcaaggtagcggttaccgtcaactgcggcagttacgccatcttgcaataatagcagttcgtcgccttcactgagcagacgcagcagcgcagcaaaatccgtcagccagggtgaacgatgtaacgtgtgcagcataaacgcctcaaaacctcaaaataacatcgtagttggcgagttcgcggcgtaaggcatctgcttcgagcggcgtggcttcgacaacaaagggggtctgcggatctaacccgcgttcgcgcagtgaagccgcacaaacccagcactgttcaatgtcgtacagacccaacaatttaaaagtggcaatgtaatcacgcgccagcactgcatcgggcttttgtcctggcagtagctgaaaaacgccatcagcaataaagaagacggccagctcgtcagttaacgcggaagttgccagtaaagcatctaaaccttcccgcccggcagcggtaccatgaggcacagtanaaaaaacaaacgcaattcgtttcatcagaactgtaccaccctgtcacaggtcagcgaggcttccgccagcgcgccaagtccgcttaaggtaaatccctgctgaaggtttgacgaagccagccccagtcttccggcctccgtttcatcaacaacgccacggcgtaatgctgccgctacgcagatattcagcgccacaccatgttgcgcattcaactgttgccagccgcgcacaaggtcaaattcgtcgcttgccggtgaggtcaagtggttagcgttatagaccccttcccgatagaaaaagacgctgcttaacttatggccttctgctatcagcgcctgcgcaaactgaaaagcactactcgcctgttgcgtaccgtatgctggcccggtcaccacgatggcaaaacgcattacttatcttgcccctggaaatcaccgctcttgaactggcggatgtagagatagacagtgtgtttggagatgttcaggcggtcagcaacctggttgatcgcatctttaatatcgaagatccctttctcgtagagattcagcacgatctgacgatttttggcgttattagaaacattgcgatcggcattcacttcttcgatggtgaactccagcgtttgggtaaccagatcttcaacagaagaggcaaagttgacgcttgaaccgacatccggggtttctggcggcacaaaggtgctcataatctgcgagaagggaacatcaagattcatattgatgcacagcagaccaattacacgctgttcgcggttacgaatcgcgatagtcagggacttcattaatacnccgcttttggcgcgagtaaagtagcatttagaaacgctgctatccgctcccgtcatatcgtgcagcatacgtagcgccaggtcagtaattggcgaaccaatcttccggcctgtatgttcaccgttagcaatgcgaatggctgaacattttagatcctgcaaagagtgcaaaacgatttcacagtgggagccaataagcatcgctaacccgtccaccaccgcttcgtaggatttcagaatatcaaaatcggtctgctcgaaaggacgttgatccagtaaatccaactcactggtttcgttggttaaaagcgacctggacatgaaaaaaaacactccttttcaggagcctgtcgttaacttttcagggcaggctcattaatgatgcgggtaactaaattaatacagcggaggttccgctttccagcactaattatatccggcctgtaanaaaaaaaccgccgcctggtcaggcggcggttcttaatgcttattttttagcagaatctgcggctttcgcatcagcttccggctttgcatcagccttcggcgctggtttcacatccagcagctctacgtcaaacaccanggtagaattcggtgggatccccggaacacccgctttgccgtaagccagttctggtggaataaccagtttgatcttaccgcctttcttgatgttcttcagaccttctgtccaacccgggataacaccgtccagacggaaagagagcggttcaccacgggtgtaagagttgtcgaactctttaccgtcgatcagcgtacctttgtagttcacgacaacagtatcgctgtctttcggtgcttcgcctttaccggcttctactacctgataaaccaaaccagtggaagaggttttcacacctttctctttggcaaatttctcgcggtactctttaccttttgcttcgttatcagccgcgtctttttccatcttcgcctgagcagaagacttcacgcgagcttcgaatgcttgcagagtctgttcgatctcttggtcggagagtttgctcttatcagcaaatgcatcctgaacaccagcgatcagctgatctttatccagtttgatgcccagtttttcttgttcttttagagagttttccatgtaacgacccagcgaggcacccagtgcataagctgatttctgatcgtcatttttgaacgctgctttgctgtcagcagttgtagcaggttttgcagcttcagcagcaaaagtgattggtgcatgcaaggcaacggccattgtggtcgccagcagcgttactttaaacagtgatttcatccatatctccaggatcggggcatctcaccccagggttaactattatcagaagggtactataaagcgttgtcgaacaaatctacatacagacacgccctattatcatctattttcagactctttttgtttaaattagtttcgatgaccgcgaaatgagtgctgtctcgggcagcaaagttaagtagaatccgcggcgaccattcgacaaaagaggtgaatcatgcaggatttatcattggaagcacgcctggcagagctggagagccgactggcttttcaggaaatcaccattgaagaactgaacgtcacggtgaccgctcatgaaatggagatggcgaaactgcgcgatcatctgcgtctgctgaccgagaagttaaaagccagccagccgtcgaacatcgcgtcgcaggctgaagaaacgccaccgccacattattgaggcgtaaaannnnnnnnnnnnnnnnnnttttttgtcaccttttcggtattagtggcaaccgcaaccgccgttgcctttaccgccacagcagccttcgccaccgtgttcatgaccgtgatcgtggccatgaccgccgcagcaaccgtcgtggtcgtgatcgtggtgatgatcgtgcacgccgtgaacgtggccatgagccagttcttcttcggtcgcttcgcgaatcgccacaacttcaacgttgaatttcaggttctgaccggccagcatgtggttaccatcaaccacgacgtgatcgtcttcaaccgcagtgatttcaaccggtaccggaccctggtcggtttcagccaggaaacgcatacctacctgcagttcatcaacgcccataaatacgtctttaggaacacgttgcaccagcttttcgtcgtactgaccgtaagcgtcgttcgcgccaacagcgacatcaaatttgtcgccaacttcatgaccttccagcgccgtttccaggccagagatcagggaaccgtgaccatgcaggtagtccagcggcgcactcaccggagactcatcaaccaacacaccgtcttctgtacgtacctgataggccaggctgaccaccaggtcttttgctactttcatgatatctcctgagcatgggaagaatagtggcgcagattgtagcggaattctgcagccgtgtactcactagcttaaaaaaactcggcgcatatcgctagtccggatgaaaaatcccgatcacttgctcatctttgcgaacgtgatcgcgggcttctttgtctgcttctcgcatctggtgtccgcacttaacgcattcaacaatatcaatattattttcgcgccacatcgccattgaatcctgcgcctgacaggccgggcattttgcgcccgcaataaaacgttttcggattgccatctttaccctctactcaaattcatcccagccgtccagctggcgtcgttcttgttgcatttcacgctggaaaatctcttccagttcgcgtcgggcttccctggcgcgagaaatttgtacggtatcggcatgcattgggatgagctctcgcagcatccgcatatccaggcggcgaaaatgcagttgcgcccgctgtgcctgatgcggatgcataccaagcgtgaccagcgtcttgcgccccagctctaacgcactggagaatgtttcacgggaaaactgcgtcacccctgcctgtaataactcatgcgcttccacacgtccgcgcgctcgcgcaagaatatgcaaatgcggaaagtgctgctggcatatttccaccagcttcatggtgtcttccggctcgttacaggtaatgacgatagactcagcggcctctgcacccgcagaacgtaaaagatctacctgcgtggcatcaccgtaataaactttgtagccatatttgcgcatcaggttaacggcgctgatatcccgctccagcacagtaatgcgcattttatttgccatcaacaaacgaccaatcacctgcccaaaacgtccaaagcccacgacaatgacctggggtttatcatcgttgacccacggtttttcgtcttcttcttccggtccgttaaactggcgggatagccatttatccaccagcttcatcagcagcggcgtggtcatcatggaaagcgtcaccgtcaccagcaacagcgccatctggtcgccctggaataagcgttgtgaagaagcggtagaaaagaggacaaaggcaaactcaccgccctgactcaacacgccagcaaactgcatccgctctgagctacgcacgccatacaatcgcgccagcagatacagcacgagaattttcaccgccaccagcacaaccacgcttatcactacccacaacagatgggtataaagcaccccgaggttgagtgacatcccgacagagataaagaacaaaccgagcagcaagcctttaaagggatcgatagccgtttccagttcatggcgatattcactttccgccagcagcacgcctgcaataaacgtaccgagcgccatcgacagccccaacgcatccataaacaatgcggaacccaataccagcagcagcgtcgcggcggtgaacacttcccgcacgccagaagctgcaataaaacggaataccggacgcaataaatagcgcccgccaatcagcatgccgacaaacgccagcaccttcatgccgatcttcatccagtcgaaatgttcgtctgccgaacccgccaacaacggcactaacgccagtgccgggatcaccgccagatcctgaaacagcagtaccgaaaacccgagctgcccggattcgctgcgattcatccctttctcacgcatcaattgcaacgccattgcggtcgaagacatcgcaaggccaatgccaccgaccaccgccgcctgccaggcgaaatccgtcagcatcaataatcccgccagcaacgccgcgcttaacagcacctgtgccgcgcctacgccaaaaatcgaacgccgcagttgccaaagcttggagggattcaactcaaggccgatgataaacatcaggaacaccacgccgagttccgaaaagtggaggatctcatcgacgtcgctaataaaccccagcccccacgggccaattgcaatccctgccagcaaatatcccaacacagcgccaatacccagccgcgatgccaacggcaccgcagccaccgccgcgaagagaaacagcactcctgcaagtaaaaaatcggaaccttccatcagcggcctcctggagacagcggatttgccagccagtcaccgtaggntctggcgtggctcgccagctcctgtgcgctttgccgtctcgcccagtaaataatgatgggacttaaccaatgcatccggcacatgcccgccgccagttcaaaggggcgcaggacatcgctcatcgggtagcgattcaacgcgtcataacggtaagcactttccggctcgccggtggtaatcacactacgccagtactttcccgccagttggtttcctcccggcccgctggcaaaaccacggcttaatacccggtccagccactctttcagtagcgccgggcagctataggtataaagaggatgctgaaagacaatcacctcgtgctcgcgcagtaatgcctgctcacgggggatatcaataaaaaaatcgggatagtgcgcgtaaaggtcgtgcacggtaacattgctgagctgcgtggccggtttaagcagtacccggtttgccaccgagtcctgagattccggatgggcatacagcagcaaaactttcgctggctgagacatcatccccctcccggtatggtttttgtgtatagtcgctgttttgggctaccattgcgcccggtgcggcagctcgcccatacattacattatcataatgataagttaacatagtctgaacatacggcaccttatgattgttttctcctcgttacaaattcgtcgcggcgtgcgcgtcctgctggataatgccaccgccaccatcaaccccgggcagaaagtcggcctggtgggtaaaaacggctgtggtaaatctaccctgctggcattgctgaaaaatgaaatcagcgccgacggcggcagctacacctttccgggaagctggcaactggcgtgggtgaatcaggaaacgccggcgttaccgcaagcggcgctggaatatgtcattgacggcgaccgtgaatatcgtcaactggaagcgcagctacacgacgccaacgaacgtaacgacgggcacgccattgcgaccattcatggcaagctggatgctattgacgcatggagtattcgctcccgtgccgccagcctgctgcacggcctcggtttcagcaatgaacaactggagcgcccggtaagtgatttctctggtggctggcgtatgcgtcttaaccttgcccaggcgctgatttgccgttcagacttgctgctgctcgacgaaccgactaaccacctcgatctcgatgccgttatctggctggaaaaatggctgaagagctatcagggcacgctgatcctgatctctcacgaccgcgacttcctcgatccgatcgtcgataaaattattcatatcgaacaacaaagcatgttcgagtacaccggcaactacagttcgtttgaagtacagcgcgccacccgtctggcgcagcaacaagcgatgtacgaaagccagcaggaacgcgtagcgcatctgcaaagttatatcgaccgtttccgtgccaaagccaccaaagcgaagcaggcccagagccgcattaagatgctcgagcgtatggagctgattgcccccgcgcacgtcgacaacccgttccgctttagcttccgcgcgccggaaagcctgccaaatccgttactgaagatggaaaaggtcagcgcaggctatggcgatcgcattattctcgactcgattaaactgaatctggtccccggttcgcgcattggtctgttaggccgcaacggcgcgggtaaatcgacattaatcaaactgttagccggtgaacttgcgccagtcagtggtgagataggcccggcaaaagggatcaagctcggctacttcgcccagcatcaacttgaatacctgcgcgccgacgaatcgcctattcaacatctggcacgtttagcgccgcaggaactggagcaaaaactgcgtgactacctcggcggctttggtttccagggcgataaagtaaccgaagaaacgcgccgcttctccggtggggaaaaagcccgcctggtgctggcattaatcgtctggcagcgtccgaatctgctgctgctcgacgaaccgactaaccaccttgaccttgatatgcgtcaggcactcaccgaagcattaatcgagtttgaaggcgcgctggttgtcgtttcgcacgaccgtcatttgctgcgttccaccactgacgatctctacctggttcacgatcgtaaagtcgaaccgttcgacggcgatctggaagattatcaacagtggttgagcgacgtacaaaagcaggaaaaccagaccgacgaagcgccaaaagagaacgcgaacagcgcccaggcacgtaaagatcagaagcgtcgggaagcggagctgcgtgcgcaaacccagccactgcgtaaagagattgcccgtctggaaaaagagatggagaagctgaacgcgcaactggcgcaggcagaananaaactcggcgacagcgaactgtatgaccagagccgtaaagcggagttgaccgcctgcctgcaacagcaagccagcgccaaatccggcctggaagagtgcgaaatggcatggctggaagcccaggagcagcttgagcagatgctgctggaaggccaaagcaactgatggcgcagataacgacgaccgatgccaatgaattcagcagcagtgctgaattcacccctatgcgcggctttagcaattgtcatctgcaaaccatgctgccgcgtctgtttcgtcgcaaggtgaaattcaccccgtactggcagcgactggagttgcccgacggcgattttgtcgatctcgcgtggagtgaagcccctgcacaggcgcaacataaacctcgtctggtggtgtttcacgggctggaaggcagtctcaatagcccttacgcccacggtctggttgaggcnncgcaaaagcgcggctggctgggcgtggtgatgcattttcgcggatgcagcggtgaaccaaaccgtatgcaccgcatttaccattcgggcgaaaccgaagacgccagttggtttttacgctggctgcaacgcgagtttggccatgcgccaacggctgccgtcggctattcgctcggcggtaatatgctggcctgtttgctggcaaaagaaggcaatgatctcccggttgatgcggcggttattgtctctgcgccgtttatgctggaagcctgtagctatcatatggaaaagggcttttcccgcgtttatcagcgttacttgctgaacctgttaaaagccaatgccgcgcgcaagctggcagcctaccccggaacactgccgattaatctcgcgcagttaaaatcggtacgtcgcatccgtgaatttgacgatctcatcaccgccagaattcacggctacgctgacgctatcgactattatcgtcagtgtagcgccatgccgatgctgaaccggatcgccaaaccgacgctgattattcacgccaaagacgatccgtttatggatcatcaggtgatcccgaaaccggaaagtctccccccgcaggtggagtatcaactgactgaacatggcggtcatgttggctttattggcggtacattacttcatccgcaaatgtggctggagtcacgcattcctgactggttaacaacgtatctggaggcgaaatcatgttgattccgtggcaagacctctcccccgaaacgctggaaaatttaattgaaagctttgtgttacgtgaaggcaccgattatggtgaacatgagcgtacacttgaacagaaagtcgccgacgtcaaacgccagctacagtgcggagaagcggtgctggtatggtcggagctgcacgaaacggtcaatatcatgccgcgcagtcagtttcgcgaataacctgcaaccgtcggcggacgagataataatgatagctaagtcatggagttactatgtctgccaaacatccggtcattgcggtaacaggatccagcggcgcggggaccaccaccaccagcntcgcgtttcgtaaaatattcgcgcagttaaatctgcatgcagccgaggtggaaggcgacagttttcaccgttacacccgcccggaaatggacatggcgatccgcaaagcgcgcgacgccgggcggcatatcagctacttcggccccgaagcgaacgacttcggcctgctggaacaaaccttcattgaatacggtcagagcggcaaagggaaatctcgcaaatatctgcatacctacgatgaagccgtaccgtggaatcaggtaccgggaacattcaccccctggcaacctttaccagaacccactgatgtactgttttatgaaggtttacacggcggcgtagtcacgccacagcataacgttgcgcagcatgtggacttactggtcggcgtggtgcctatcgttaaccttgagtggattcaaaaactgatccgcgacaccagcgagcgcgggcactcacgagaagcagtgatggattcagtagtgcgttcaatggaagactatatcaactacatcacaccgcagttttcccgcacccatcttaacttccagcgcgttcccaccgtcgacacttcaaacccgttcgcggcaaaaggtatcccgtcgctggatgaaagctttgtggtgatccattttcgtaatctggaagggatcgatttcccctggctgctggcgatgttgcaaggctcattcatttcccacatcaatacgttagtggtgcccggcggcaaaatgggtctggcaattgaattaattatgctgccgctggtgcaacgattgatggaaggaaagaaaatcgagtaactctgctattacgccggataaaatactatccggcttcacaacgggatagttaaatcacgcggcaaccacttcatacgagtgagtaatattcaccgctttttccagcatcaacgccactgaacaatatttctcagcagagagatcaaccgcacgcgcaaccgctgcgtctttcaggtcgcgaccggtgacgataaaatgcagattaatgtgcgtaaacaggcgtggtgcctcttcgcggcgttcagaggtcaattttacttcacaatcgaccacatcctgacgccctttttgcaggatcgaaaccacatcgatggcactgcaaccacccgccgccatcaacaccatttccatcggacttggtgctttatcgcctgagttgccgtccattaaaatctggtgaccagaggcagattcgcccagaaaagttaacccttcgacccacttcactcgcgcttgcatttttgctactccactgcgtcaattttcctgacagagtacgcgtactaaccaaatcgcgcaacggaaggcgacctgggtcatgctgaagcgagacaccaggagacacaaagcgaaagctatgctaaaacagtcaggatgctacagtaatacattgatgtactgcatgtatgcaaaggacgtcacattaccgtgcagtacagttgatagccccttcccaggtagcgggaagcatatttcggcaatccagagacagcggcgttatctggctctggagaaagcttataacagaggataaccgcgcatggtgcttggcaaaccgcaaacagacccgactctcgaatggttcttgtctcattgccacattcataagtacccatccaagagcacgcttattcaccagggtgaaaaagcggaaacgctgtactacatcgttaaaggctctgtggctgtgctgatcaaagacgaagagggtaaagaaatgatcctctcctatctgaatcagggtgattttattggcgaactgggcctgtttgaagagggccaggaacgtagcgcatgggtacgtgcgaaaaccgcctgtgaagtggctgaaatttcgtacaaaaaatttcgccaattgattcaggtaaacccggacattctgatgcgtctgtctgcacagatggcgcgtcgtctgcaagtcacttcagagaaagtgggcaacctggcgttcctcgacgtgacgggccgcattgcacagactctgctcaatctggcaaaacaaccagacgctatgactcacccggacggtatgcaaatcaaaattacccgtcaggaaatcggtcagattgtcggctgttctcgtgaaaccgtgggacgcattctgaagatgcttgaagatcagaacctgatctccgcacacggtaaaaccatcgtcgtttacggcactcgttaatcccgtcggagtggcgcgttacctggtagcgcgccattttgtttcccccgatgtggcgcagactgatttatcaccccgatattaactatgcactgcgacaaacgctggtgctatgtttgcccgtggccgttgggttaatgcttggcgaattacgattcggtctgctcttctctctcgttcctgcctgttgcaatattgcgggccttgatacgcctcataaacgttttttcaaacgcttaatcattggtgcgtcgctgtttgccacctgtagcttactgacacagctgctactggcaaaagatgttcccctgccttttttgctgaccggattaacgctggtacttggcgtcactgctgagttggggccattgcacgcaaaattgcttcccgcatcgctgctggcagccatttttaccctcagtctggcgggatacatgccggtctgggaaccgttgctcatctatgcgttgggcactctctggtacggattgtttaactggttttggttctggatctggcgcgaacaaccgctgcgcgagtcactaagtctgctgtaccgtgaactggcagattattgtgaagccaaatacagcctgcttacccagcacaccgaccctgaaaaagcgctgccgccgctgctggtgngccagcaaaaagcggtcgatctaattacccagtgctatcagcaaatgcatatgctttccgcgcaaaataatactgactacaagcggatgctgcgtattttccaggaggcgctggatttacaggaacatatttcggtcagtttgcatcagccggaagaggtgcaaaagctggtcgagcgtagccatgcggaagaagttatccgctggaatgcgcaaaccgtcgccgctcgcctgcgcgtgctggctgatgacattctttaccatcgcctgccgacgcgttttacgatggaaaagcaaattggcgcactggaaaaaatcgcccgccagcatccggataatccggttgggcaattctgctattggcacttcagccgcatcgcccgcgtgctgcgcacccaaaaaccgctctatgcccgtgacttactggccgataaacagcggcgaatgccgttacttccggcgctgaaaagttatttgtcactaaagtctccggcgctacgcaatgccggacgactcagtgtgatgttaagcgttgccagcttgatgggcaccgcgctgcatctgccgaagtcgtactggatcctgatgacggtattgctggtgacgcaaaatggctatggcgcaacccgtctgaggattgtgaatcgctccgtgggaaccgtggtcgggttaatcattgcgggcgtggcgctgcactttaaaattcccgaaggttacaccctgaccttgatgctgattaccacccttgccagctacctgatattgcgcaaaaactacggctgggcgacggtcggttttactattaccgcagtgtataccctgcaactgttgtggctgaacggtgagcagtacatccttccgcgtcttatcgataccattattggttgtttaattgctttcggtggtaccgtctggctgtggccgcagtggcagagcgggttattgcgtaaaaacgcccatgacgctttagaagcctatcaggaagcgattcgcttgattctgagcgaggatccgcaaccaacgccactggcctggcagcgaatgcgggtaaatcaggcgcataacactctgtataactcattgaatcaggcgatgcaggaaccagcgttcaacagccattatctggcagatatgaaactgtgggtaacgcacagtcagtttattgttgaacatattaatgccatgaccacgctggcgcgggaacaccgggcattgccacctgaactggcacaagagtatttacagtcttgtgaaatcgccattcagcgttgtcagcagcgactggagtatgacgaaccgggtagttctggcgatgccaatatcatggatgcgccggagatgcagccgcacgaaggcgcggcaggtacgctggagcagcatttacagcgggttattggtcatctgaacaccatgcacaccatttcgtcgatggcatggcgtcagcgaccgcatcacgggatttggctgagtcgcaagttgcgggattcgaangcgtaatgcaggctaaaccatcggataaggcatgcacgccgcatccgacatcttttgcctgatgcgtcttatttacgccccaaccaccttcgccaccgcgtgggcgaaacgttgcatcccttcatcgatatccgcatcttccaccaccagcgacggcgcaaaacgcatcacatccggtccggcattcagcaccattacgccagcctctgcgcccgcatacaggaaatcacgcgcctgacctttgtactgtggtttcagctccgcgccaattaacagccccataccgcgaatatcgctaaacacatcgtactgctgatcgatcttctgcaaatggtcaacaaaacgctggcgtttcgcctgaatgccttccagcacttcaggggtattaatgatatcaaacgccgcgcccgctactgcacaggccagaggattaccgccgtaggtggaaccgtgagaaccaggatgaaacgcagaagcaatttccgccgtggtcagcatggcgctaatcgggaagccgccgcctaacgctttcgcagaagtcagaatatccggcgtcacgccgtagtgcatgtaagcaaacaaatcgccagtccgccccatcccgcactgtacttcatcaaacaccaataatgcctgatgttgatcgcacaactcacgcaagccctgcaaaaactctggcgtcgctgccgtcacaccgccctcgccctggatcggctcaaccaccaccgcacaggtgtgatcatccatcaccgctttcactgcgtggagatcgttaaagggaacgtggatgatgtctgatggttttggcccaaagccgtcggaatattttggctgcccacccaccgaaacggtaaacagcgagcgaccatgaaaagcgttatggaaggcaataattttggttttgaacgggctatgacgcacgcaggcgtaatggcgtgccagtttaaaggcggtttcgttagcttccgtgccggagttcataaacaccacgcgttcggcaaacgtcgcctcaatcagtttacgcccaagacgcagcgccggttcattggtgaaaacgttactgatatgccacagagtttcgccctgggtttttaacgcgttcaccagcgcaggatggcaatggcccaacgccgtaactgcaatgccacccgcgaaatcgacatactccttgccttgctgatcccagattcggctgccctgaccttttaccggaatgaactctgccggagcataaatcggcaggatcacttcatcgaaagtcgcgcgtgtaattgctgtttgttcaattgccatctcatgatcaccctgttatgcataaataaatgtgaaattataatcacaaaatatgcataaaaaatcattgaatggcaatcagaaatcagcgatgcaggaaattagccagcagttgatgtccttgttcgctaagaatactttctggatggaactgcacaccttccagatcccactggcgatggcgaatccccataatctcgcgggtttcgctccaggccgtcacttcaaagcacgctggtaacgagtcaggttccactaccagcgaatgatagcgtgtcacggtaagtggatttgccagcccccgaaatacgccctcaccgttatgtgtaatcggcgaggttttgccgtgcatgacctttgcggcgcgcacaactttaccgccaaatgcctgcgccattgcctgatgaccgaggcagacgccaagaatcggcaagcgcccggcatagtggcgaataacgtcaagggagatcccggcttcatctggcgtacaggggccgggtgagatgacaactttttgtggtttaagggcgtcgatatccgccagcgtcaacgcatcgttgcgcttaaccagcacatccgcccccagttcacaaaagtactggtagaggttccaggtaaaagaatcgtagttatctataagcaggatcatggcggctccggtacgaaagaaccgcgctattttactcagattccccggcttcgcttaccactttgctaaatatcatctgcaacgcggtgagatcccccattgccccactctgatttgcctgattccaggcctctttttcgataccctgccagctcagttgatatccggcatgaatcgccagttgctcgaagaagatccgctgtgccagaccacttcccacccggaagggatgcagcacgttgatttcacaatagtaatgcgccagccgctcgacgaacttcgttttctccaggccaaccagataaccttcttcctccagatcctgcatcagggcattgccctctttttcgatataagcaaagtggcagaacggcgtatcgccctgataaatatcaacttcacgcagttgccctgcccagtcgaaaatatcctgatacagctggcgatggatagtgcgcaaatgcggtaaaccgcgcaccagcggaccaagctcaatggtcgcagcacgcagcgccgtcatttcgtaagcggtctgttccagccgttgttgctggcggatgttcagccggttacgcatgatatcaaggccaggataaagatacggatcgcgcccttcgccgaatttatcgctcatagtgactcctcagctcttcaaggcgcgctaaagcctctgcggcagtaagagtgactaaaggcatctcgacgccttcaagacggcgactggcctgaaaattacgattacgctgaagctcccagagacgggacttttgcttatcggtgagtttcttcacttgatgcctccctgaacgtgtccatttgccacaagtataagcggcaaatccgggttacgccgggagagcagaagcgcgggcaagattnnnngcgngagaaatcattacggcaggactttagcggaaaggataactaccggttttgacggcacattctggtacggaccaacgtcatgagtcggcacctgggaaatcttatcggcaacgtccatgcctttcaccactttaccaaataccgcgtaaccgaaatcacgctgaccatggtcaaggaaggcgttatcggcaacgttgataaagaactggctggtggcgctgtctttgtcagcggtacgcgccatcgcgatggtgccacgcgtgttgcgaaggccgttatcggcttcatttttgattggcgggtttggttttttctgctgcatctgctcggtgaaaccgccgccctgaatcataaagccaggaatgacgcggtgaaaggtagtgttgttataaaaaccgctgttcacataatcgacaaagttttgcacagacactggcgctttttgtttatccagctccagttcgatgttaccagctgaggttgtcaacaatacgtgcgggtcccctttcgctgccattgctgcgggagaaagagcagaaagagcgaaaacagcagccatcgccgccagggtcgatttgaacatgagatttccttaacaaacagagcagaaaaaaagcaagtgaagagattctaaatagccttcaagaacaaggccatccctttacctaattttacgtatctgaaatatatgtaacctgacgatcactttttattccgtgatcaaaatcacctcttaaaatgcaatttagcaaccgattgcaataaaacatttaaacagatcacaaaatcacctaaaatcgcccgctcgcggcatatcccgctatgccattttatttttgaacgcaggccaatcatgactaacagcaatcgcatcaagctcacatggattagctttctctcctacgcactgactggtgcgttggttattgtcaccgggatggtgatgggaaatatcgccgattatttcaatctgcctgtttccagtatgagtaacaccttcaccttcctcaacgccggcattttaatctctatcttcctcaacgcctggctgatggaaatcgtcccgttgaaaacgcagttacgttttggctttctcctgatggtgctggcggttgccggtttgatgttcagccacagcctggcgctgttctcggcggcgatgttcattctcggggtggtcagcggcatcaccatgtcgattggtacattcctggtaacacaaatgtatgaagggcgtcagcgcggttcccacctgttatttaccgactccttcttcagtatggctgggatgattttcccaatgatcgccgcgtttctactggcgcgcagcattgagtggtactgggtttatgcctgcatcgggctggtgtatgtcgctatttttattctgaccttcggctgtgagttcccggcgctgggcaaacatgcaccaaaaacggatgctccggtagcgaaagaaaagtgggggatcggcgtactgtttctctctgttgcggcgctgtgctacatcctcggtcagttaggttttatctcctgggtgcctgagtatgccaaaggcctgggcatgagcctgaatgatgctggcacgctggtgagtaacttctggatgtcatacatggtcggcatgtgggcgttcagctttattcttcgcttctttgatttgcaacgcattctgaccgtactggctggtctggctgcgattctgatgtacgtctttaacaccggaacaccggcacatatggcgtggtcaattctcgccctgggcttcttctccagcgcgatctataccaccatcatcaccctgggttcacagcagaccaaagtaccgtcgccaaaactggttaactttgtcctgacctgcggaaccatcggtactatgttgacctttgtggttaccggcccgattgttgaacatagcggtccgcaggcggcactgcttacagcaaacggtctgtacgctgtcgtctttgtgatgtgcttcctgttaggtttcgtcagccgtcaccgtcagcataacaccctgacctctcattaattgctcatgccggacggcactatcgtcgtccggccttttcctctctaaccccgctacgtgcatctatttctataaacccgttcattttgtctattttttgcacaaacatgaaatgtcagacaattccgtgacttaagaaaatttatacaaatcagcaatataccccttaaggagtatataaaggtgaatttgatttacatcaataagcggggttgctgaatcgttaaggtaggcggtaatagaaaagaaatcgaggcaaaaatgagcaaagtcagactcgcaattatcggtaacggtatggtcggccatcgctttatcgaagatcttcttgataaatctgatgcggccaactttgatattaccgttttctgtgaagaaccgcgcatcgcttatgaccgcgtacacctctcgtcttacttctctcaccacaccgccgaagagctgtcgctggtgcgcgaaggcttctacgagaaacacggcatcaaagttctggtcggcgaacgcgctatcaccatcaaccgtcaggagaaggtgattcactccagcgccggacgtaccgttttttatgacaagctgatcatggcgaccggttcctacccgtggatcccgccaattaaaggttctgatactcaggactgctttgtctatcgcaccattgaagacctcaacgccattgaatcctgcgcccgtcgcagcaaacgcggtgccgttgttggtggcggcctgttaggtctggaagccgctggcgcgctgaaaaacttaggtattgaaacccacgttatcgaatttgcccctatgctgatggcagaacagcttgatcagatgggtggcgagcagctgcgtcgcaaaatcgagagcatgggcgtgcgcgttcacaccagcaaaaacacccttgagattgtgcaggaaggtgttgaagcgcgtaaaaccatgcgttttgccgacggcagcgaactggaagtcgactttatcgtcttctctaccggtatccgtccgcgcgataagctggcaacccagtgtggtctggacgttgctccgcgtgggggtattgtcattaatgattcctgccagacttccgatccggatatctacgccatcggtgaatgcgcaagctggaacaaccgtgtatttggtctggtagcaccaggctacaaaatggcgcaggtcgccgttgaccatattctcggtagcgaaaacgcctttgaaggtgctgaccttagcgccaagctgaaactgctgggcgtagacgtaggcggtattggtgatgcgcacggtcgcacgcctggcgcacgtagctacgtttacctcgacgaaagcaaagagatctacaaacgccttattgtcagcgaagacaacaaaaccctgctcggtgcggtactggtgggcgataccagcgactacggcaacctgctgcaactggtgctgaatgctatcgagctgccggaaaacccggattntctgattctgccggcgcactcgggtagcggtaagccgtctatcggtgttgataaactgccggacagcgcgcaaatctgctcctgcttcgacgtcaccaaaggtgatctgattgctgccatcaacaaaggctgtcacaccgttgcggcgctgaaagccgaaaccaaagcgggtactggctgcggtggctgtatcccgctggtcactcaggtactgaacgcggaactggcgaaacagggcatcgaagttaacaacaacctgtgcgaacactttgcttattcgcgtcaggaactattccatttgatccgcgttgaaggcattaaaaccttcgaagaactgctggcgaaacacggcaaaggttacggttgtgaagtttgtaaaccgaccgtcggttcgctgctggcctcctgctggaacgaatacattctgaagccggaacatactccgctgcaggattctaacgacaacttcctcgctaacatccagaaagacggcacctactcggtgatcccgcgctctccgggcggtgaaatcaccccggaagggctgatggcggtaggtcgtatcgcgcgtgaatttaatctctacaccaagatcactggctcccagcgtctggcgatgtttggcgcacagaaagacgatctgccggagatctggcgtcagctgattgaagccggcttcgaaaccggtcatgcctatgcgaaagcactgcgtatggcgaaaacctgcgtgggtagcacctggtgccgctacggcgttggcgacagcgtcggcctcggcgtggaactggaaaaccgctacaaaggcatccgtacgccgcacaaaatgaagttcggtgtctccggctgtacccgtgaatgttcagaagctcagggtaaagacgtgggtattatcgccactgaaaaaggctggaacctgtatgtttgcggtaacggcggcatgaaaccgcgtcatgcggatctgctgncggcggatatcgatcgcgaaacnctnatcaaatatctcgaccgcttcatgatgttntacatccgtactgccgacaaactgacgcgtaccgcaccgtggttagaaaacctcgaaggcggcatcgattacctgaaagcggtgatcattgacgacaaactggggctgaacgcacatctggaagaagagatggcgcgcctgcgtgaagcggtagtgtgtgagtggactgaaacggtcaatacgccgtctgcgcagactcgcttcaaacacttcatcaacagcgacaagcgtgacccgaacgtgcagatggtgccagagcgcgaacagcaccgtccggcaacgccgtatgaacgtatcccagtaactctggtggaggacaacgcatgagccagtggaaagacatctgcaaaatcgatgacatcctgcctgaaaccggcgtctgcgcgctgttaggtgacgagcaggtcgcgattttccgcccgtatcacagcgatcaggtgtttgcgatcagcaacatcgacccgttcttcgagtccagcgtgctgtcacgcggactgattgcggaacaccagggcgagctgtgggtcgccagcccgctgaaaaaacagcgttttcgcttaagcgacggcttgtgcatggaagacgaacagttttccgtcaaacattacgaagcgcgagtgaaagacggcgtggtgcagctgcgcggttaatgttttaacgggaggcgcaatgcctcccctttttgcatggtcctgtaataaccttcggtatattgcaggacattttttaaactttttgttttattttttgtttttattttttaaaggataatcaaatgtttacagacactattaataagtgtgcggctaacgctgcgcgcattgcacgcctgtcggcaaataacccgctcggcttttgggtcagctccgccatggcgggcgcgtatgtgggtcttgggatcatcctgatttttacgctcggtaatttgctcgatccatccgtacgccctctggtgatgggcgcgacctttggtatcgccttaacgctggtgattatcgccggttctgagctgttcaccggacacaccatgttcctcacctttggggtgaaagcgggcaccatcagccacgggcaaatgtgggcaatcctgccgcaaacctggctgggtaacctggtcggttccgtcttcgttgccatgctctatagctggggtggtggtagcctgctgccggtagataccagcatcgttcactccgtcgcgctggctaaaaccactgcaccggcaatggtactgttcttcaaaggtgcattgtgtaactggctggtttgtctggcaatctggatggcgctgcgcactgaaggggcggcgaaatttatcgcaatctggtggtgtctgctggcatttatcgcgtccggctacgagcactccatcgctaacatgacgctgttcgcgctctcctggttcggcaaccacagcgaagcctacacgctggcgggtattggtcataacctgctgtgggtgacgctgggtaatactttatcaggtgccgtattcatgggattgggttattggtatgctacgccgaaagcgaatcgtccggttgcggacaaatttaatcaaactgaaacggctgccggttaattactaaggggtttttacgtggatcatttgcctatattttgccaattacgcgatcgcgactgtctgattgtcggcggtggtgatgtcgcggaacgcaaagcaaggttgctgttagacgcaggcgctcgcttaacggtgaatgcattagcgtttattccacagttcaccgcatgggcagatgcaggcatgttaaccctcgtcgaagggccatttgatgaaagccttctcgacacctgctggctggcgattgcagcgacggatgatgacgcgcttaaccagcgcgtcagcgaagccgctgaagctcgtcgcatcttctgtaacgtggtcgatgcgccgaaagctgccagcttcattatgccgtcgattattgaccgctcaccgctgatggtggcggtttcctctggcggtacttctccggttctggcgcgcctgttgcgcgaaaaactcgaatcactgctgccgctgcatctgggccaggtagcgaaatacgccgggcagttacgcggtcgggtaaaacaacagttcgccacgatgggtgaacgccgccgcttctgggaaaaactgttcgttaacgaccgtctggcgcagtcgctggcgaacaacgatcagaaagccattactgaaaccaccgaacagttaatcaacgaaccgctcgaccatcgcggtgaagtggtgctggttggtgcaggtccgggcgatgccgggctgctgacactgaaaggtctgcaacaaattcagcaggcagatgtggtggtctacgaccgtctggtttctgacgatattatgaatctggtacgccgcgatgcggatcgtgttttcgtcggcaaacgcgcgggataccactgcgtaccgcaggaggagattaaccagatcctgctgcgggaagcgcaaaaaggcaaacgcgtggtgcggctgaaaggcggcgatccgtttatttttggccgtggtggcgaagagctggaaacactgtgcaacgcgggtattccgttctcggtggttccgggtattaccgcagcttctggttgctcagcctattcgggtattccgctcacgcatcgcgattatgcccagagcgtgcgcttaattaccggacacttaaaaaccggtggcgagctggactgggaaaacctggcggcagaaaaacagacgctggtgttctatatggggctgaatcaggctgcgactattcagcaaaagctgattgaacacggtatgcctggcgaaatgccggtagcaattgtcgaaaacggaacagcagtcacgcagcgcgtgattgacggtacgctcacacaactgggcgaactggcgcagcaaatgaatagtccatcgctaattattattggtcgggttgttggcctgcgcgataaactgaactggttctccaaccattaatttaatcagggccagagaattctggcctttttcgtttacaactctctttatatattcagcagataaaaatataactcattaacaaaaatcatttgtttttgccccgttatattcaccgttacagcgacttacaaaattaagtcattcactcactgacgccgattaaatattcctgtatcgttcttaatgagcagtctacttatattcatataatcaatgaatattaatcaatatataatacatagggaatgtaaatgaacaaatttattaaagttgcactggtaggtgcagtactggctacgttaactgcatgtactggtcatattgaaaaccgtgataagaactgctcttacgactacctgctgcacccagcaatttctatttctaaaatcattggcggttgcggtcctactgcacagtaagtctctgacagaaatcagctaacgctgatttaattgcctgacgccctcgggattacccgagggcgtatttgtttctatatccttcttgctccccacccgtaaaaatattttcactttaatttcaattggataaccacattcatcagccacagcgcgatcctgtgcgaaattatgtgatcttcctccacattacataacatcatatgttgttatattcatcatgcattgtcatgtcaccttttaaatgactgcaaactctcccctacaacgtgttggacaagaaaaaggtatcgctatgggaagccaggaactccaacgcaagctcggattttgggccgttcttgcaatcgccgtcgggacaaccgtcggctccggtatttttgtatctgtgggtgaagtggcaaaagcggcgggcacgccgtggctgacggtgctcgcatttgtcatcggcgggttaattgtgatcccgcaaatgtgcgtatatgcggaactatccaccgcttatccggaaaatggcgcagattatgtttatctgaaaaatgccggaagccgaccgctggctttcctctccggctgggccagcttctgggccaacgatgcgccgtcattgtcgattatggcgctggcgattgtcagcaatcttggctttttaacgcctatcgatccgttgctcggtaaatttatcgccgccggattaattatcgcctttatgctgctgcacctgcgctccgttgaaggcggcgcagcgtttcagacgctaattaccatcgccaaaattatcccgttcactatcgtcattggtcttgggatcttctggtttaaagcggagaattttgccgcccctgctaccactgcgattggcgcaacgggcagctttatggcgctgctggcggggatctctgccaccagttggtcgtataccggcatggcctctatctgttatatgaccggcgaaattaaaaaccccggcaaaaccatgccacgagcgctgattggttcctgtctgctggttctggtgctctacaccctgctggcgctggtgatttccggcctgatgcccttcgacaaactcgccaattctgaaacgccgatttccgacgccctgacctggatccccgcactcggcagcaccgctgggatctttgttgccatcacggcgatgatcgtcattcttggttcgctttccagctgcgtgatgtaccagccgcggctggaatacgcgatggcgaaagacaacctgttcttcaaatgcttcggccatgtgcatccgaaatacaacacgccggatgtctccatcattttgcaaggggcgctggggatcttcttcatcttcgtttccgatctcaccagcctgctgggctatttcaccctggtaatgtgtttcaaaaataccctcaccttcgactccatcatctggtgtcgtaaacgcgacgattacaaaccgctgtggcgtactccggctttcgggctgatgaccaccctcgccattgcgtcaagcctcattctggtcgcctcaacctttgtctgggcaccgattcccggccttatctgcgccgtcatcgttattgccactggtctgcctgcttacgccttctgggcgaagcgtagccgccagctcaacgctttgtcgtaatgttatctggagaaaataaaatgttggatattgataaaagcactgtggactttctggtcaccgaaaatatggttcaggaagtggaaaaagttctcagccatgacgttccgctggtgcacaccatcgtggaagagatggtgaagcgcgacatcgatcgtatttatttcgttgcctgcggatcgccactcaacgcggcgcaaacggcgaaacatctggcagatcgcttttccgatcttcaggtttacgccatttccggctgggagttctgcgataacaccccatatcgcctcgacgctcgttgcgcggtgattggcgtttctgactacggtaaaaccgaagaggtaatcaaagcgctggagctgggccgggcctgcggcgcactcactgcggcgttcaccaaacgcgcggatagcccgattacctcggcggcggaatttagcattgattatcaggccgactgtatctgggaaattcatctgctgctctgctacagcgtggtgctggagatgatcacccgcctcgcgccgcacgcggaaatcggcaagatcaaaaacaatctcaaacagctgccgaatgcgctcggttatctggtacgcacttgggaagaaaaaggccgccagcttggtgaactggccagccagtggccgatgatttacacggttgctgcaggcccgctgcgcccgctgggttacaaagaaggcatcgtgacgctgatggaatttacctggacgcacggctgtgtgattgagagcggtgagttccgtcacggcccgctggagattgtcgaaccgggcgttccgttcctgttcctgctcggcaatgatgaaagtcgccacaccaccgaacgcgccattaactttgttaaacagcgtactgacaacgtgatcgtcatcgattacgccgcaatttcgcaaggactgcacccgtggctggcaccgttcctgatgttcgtgccaatggagtggctctgctactacctgtctatttacaaagatcacaacccggatgaacgccgctattacggtggtctggtggaatattaatcctctctcccggcccggcaacgggccggatttacgcaaggagttacccgatgaaaacaggtatgtttacctgcggccaccagcggctgcctattgaacatgcattccgtgatgcaagcgagctgggttacgatggcatcgannnnnnnnnngnncgcccgcacgcgttcgcgccggacttanaagcgggcggcatcaaacaaatcaaggcgctggcgcagacgtatcagatgccgattatcggttacacgccagaaaccaacggctatccgtataacatgatgctgggcgatgaacatatgcgtcgtgaaagcctggacatgatcaagctggcgatggatatggcaaaagagatgaacgcgggttatacgctgatttctgcggcccacgcgggctatctcacgccgcctaacgttatctgggggcggctggcagagaacttaagcgaactgtgtgagtacgcggaaaacatcggcatggatctgatcctcgaaccgttaacgccgtatgaatcgaacgtcgtgtgtaatgctaatgatgtgcttcatgcgctggcgctggtgccttcgccgcgcctgttcagcatggtcgacatttgcgcgccgtatgtccaggcggaaccggtgatgagttatttcgacaaactgggcgataaattacgtcatctgcatattgtcgacagcgacggggccagcgacacgcattacattcccggcgaaggcaaaatgccgctgcgggaactgatgcgcgatattattgatcggggctatgagggatactgcacagtggaactggtaacgatgtatatgaacgagcccagactttacgcccgccaggcgctggaacgctttcgcgcgctgctgccggaggatgagtgatgaaaaccctggcgacaatcggcgataactgcgtcgatatctacccgcaactgaataaagcgttttctggcggtaatgcggtgaacgtggcggtgtactgcactcgctacggtataaagccgggatgcattacctgggttggtgacgatgactacggcacaaagcttaagcaggatctcgccagcatgggcgtcgatatcagccatgtccatacgaaacacggcgttaccgcacaaactcaggtggaactgcacgacaatgatcgcgtttttggcgactacaccgaaggcgtgatggccgactttgccctgagtgaagaggattacgcctagctggcgcagtatgacattgtgcacgcggcaatctggggacatgcggaagacgcattcccacagctgcacgctgcgggcaaacttaccgctttcgacttctccgacaagtgggacagcccgctctggcagacactggtgccgcatctcgattttgcctttgcctccgcaccgcaagaagacgaagcgctgcgtctgaagatgaaagcgattgttgcccgtggcgcaggcgtggtgattgtcacgttgggtgaaaacggcagtattgcctgggatggcgtgcagttctggcgtcaggctcctgaacaggtgacggttatcgacaccatgggtgccggagattcgttcattgccggattcctttgcggctggtctgcggggatgacattaccgcaggcgatggcgcagggaacggcgtgcgcggcacaaactattcagtaccacggtgcctggtaggcataacgttggcgtgagcatcttcacgccaacgtgctgttacttgccggaaaacgaccctataatccgtgtaattcattctttatttcagggtcgattatgtcagctacggaccgctactctcatcaactcctctacgctaccgtccgccagcggctgctggatgatatcgcgcagggggtttaccaggccgggcaacagatccctaccgaaaatgagctttgtacacaatataacgtcagccgcattaccattcgcaaagccatcagcgacttagtggcagacggcgtactgatccgctggcagggcaaaggcacctttgtacaaagccagaaggtcgaaaacgccctgctgaccgtcagtggttttaccgattttggcgtctcacaaggcaaggcgacgaaagagaaagtgatcgagcaagaacggatcagcgccgcgccgttttgcgaaaagctcaatatccccggtaacagcgaagtgttccatctttgccgggtgatgtatctcgataaagagccgctatttattgatagttcgtggatcccgctgtcgcgttatcctgactttgatgagatttacgtcgaaggaagctccacctatcagttatttcaggagcgttttgacacgcgagtggtcagcgacaaaaagaccatcgatatctttgccgccacccgcccgcaggcaaaatggctgaaatgcgaactgggcgaaccgttgtttcgcatcagcaaaatcgcctttgatcagaatgacaaaccggtgcacgtctccgaactcttctgccgcgccaaccgcatcaccttaacgattgataataaaagacattaaccgtaggccggataagatgcaccagcatcgcatccggcgatgccggcgcactgaattttacatcccgcacgttcccctcaccctaaccctctccccaaaggggcgaggggaccgtccgagcgttttgatattacggcttcgccacaaaaccaatcgcttcgtacaccgcttttagcgtacgggaagcgtgcgcgctggctttttctgcgccgtctttcatcacctgttgcaggaaggcttcatcgttgcggaaacggtggtaacgttcctgcaattcagtcagcataccggaaacggcatcagccacttcgcctttcagatgaccatacatcttgccttcgaactgtttttccagttccgggatgctctggcccgttaccgcagaaaggatatccagcaggttggaaacgcccgctttgttctgcacatcgtagcgaactaccggcggctcgtcggagtcggtgaccgcgcgtttgattttcttcactaccgatttcggatcttccagcaggccaataacgttattgcggttatcgtcagacttggacatcttcttggtcggctccagcagcgacattacgcncgcgccggatttcggaataaacggctccggcaccttaaagatatcgccgtacagcgcgttgaaacgctgggcgatatcacggctcagttccaggtgctgtttctggtcttcacccaccggtaccagattagtttgatacagcaggatgtccgctgccatcagcaccggatagtcaaacagaccagcgttgatgttctcggcataacgcgcagatttatctttaaactgcgtcatgcggctcagttcgccgaagtaggtatagcagttcagtgcccagcctaactgcgcatgttccggtacgtgggactgaacaaaaatggtgcttttctcaggatcgataccacaagccagatacaaggccagcgtatccagcgtcgctttacgcagcttctgtgcatcctggcgcacggtgatcgcgtgttggtcaacgatacagtaaatgcaatggtagtcatcctgcatgtttacccactgacgcagcgcacccatgtagttaccaatagtcaattcacctgagggctgtgcgccactaaaaacgatgggcttagtcatttttcgattcctgattttcgctatgcggaagccctaatgcgggcagaaggtcatttatagactgataaattacatcaggctggctgagatcgatagcctcgccgtagttatatccgtaggttaagccaactgatgggcaacctgccgcttttgctgcctgaatatcattgcgtgagtcgccaacaaacagcatctgttgtggagcaattcccatccgctcagccaccagtaacagcgggtccggatgcggttttttgttttgcacatcatcaccaccaatcaccacgctgaagtatttggcgatatctaaggcttcgagcagcggcgcgacgaacggcgtcggtttgttggtgaccaggcctagcggcaggcctttagcctgcaacgcgcccaacgtatcggcaacgtgcgggaacaaaaacgtcccctcttcggcaacctcgccatagtaacgatcgaacagtttacgcagaatacgtacctgttcttctgccggaatgtcgtcatcaacgggcggtttacccattgttttacgcagagtcgcacgttcctgacgcgcccaggtcaatgcgcgctccatcagaacatctgcgccgttaccaatccaggtaataacgcgttcttcacctgcgacgggcaactccagcgcatacagcgccatatctaccgcagcagcaagaccgggagcactgtccaccagcgtaccgtcgagatcaaaagcgacgccgcgaatatcttcaaacttactcatgacttacctttgccagttcactgcgcatttcatcaatgacttttttgtagtctggctggtcgaagattgccgaaccggcaacgaacatatccgcgcccgccgcggcgatttcgccaatgttgttcaccttcacgccaccgtccacttccagacgaatgtcaaagccagactcgtcgatacgacgacgtacttcgcgcagtttatccagtgtttgaggaatgaaagattgaccgccgaaaccagggttgacggacatcagcaggatcacatccagcttatccatcacgtaatccagatagctcagaggtgtcgccgggttaaataccagacccgctttacagccattttctttaatcagttgcagcgtgcggtcaacatgctcggaggcttctggatgaaaggtaatgatgctggcaccagcggcagcgaaatcaggcacaatgcgatcgaccggtttcaccatcaggtgtacgtcgataggggcggtaatgccgtagttacgcaaggatttcagcaccattggcccaatcgtcagattgggaacgtagtggttatccatgacgtcaaaatgcacgacatcagcgccagctgccagggcttttgcggtatcttcacccaggcgggcaaaatcagccgacagaattgagggggcaatcaaatactgtttcatccgcttctccttgagaattattttttcgcgggtgaaacgactcctggtttgtacaaagccagcagttcgtccacctttttacgtgtgccgccgttgctgcttatactgcgtcgaactttgacgacatgcaattttgcgcgctgataccactcacgcgttaacatcgtatcgtgattggagatcagcacaggaatatggcgctcaaccagaccttcggcgatctccgccagatgcgcttgttgttcaagcgtaaaactgtttgtgtgatacgccgtaaagttggcggtcgcagacagcggtgcataaggtggatcgcaatagacgacagatgcatcatctgcgcgcgccatgctatcggcgtaagactcacaatagaaaaaggcattctgcgctttttcagcgaagtgatacaactctgcttccgggaaatagggttttttgtagcggccaaacggcacattaaactcaccgcgcagattgtaacgacacaggccgttgtaaccgtagcggttcaaatataaaaacagtaccgcccgacggaacggatcctggcttttgttgaactcttcgcggaactgatagtaaacctcggcgcaatttgtttcgggaacaaacagctcgcgtgcggcctgtacgtactcatcagtacgcatcttcacaatgttatagagactgatcaggtcgctattgatatcggcaaggatataacgagaaaagtcggtgttgagaaacaccgacccggcacctacaaaaggctcaaccagacattcgcccttgggcaaatgccgtttaatatcatcaagcaggggatacttgccccctgcccacttcaaaaaagcgcgatttttcttcatgctgactaactaattacaccttctccggctgtggagaaagctccgacagcatccagcgcttcaggcaactcccgcaacgataaaccattgcgggagataaccttgattacttcagatcggcctgtacctgacgcagcggtttcgcccacgggtttttggcctgaacatctgctggcaatgtagataccgcttttttcgcctcttctttcgaagcgtacacgccagaaaccaggacataccacggctgaccattacgcgtcgtttcatagacaacgtagtttttcagattctctttcttcgcccaaccgttcaggttgtcgtagttagaggaactgctcagctgcagagtgtaatggctggacggtgccgatttcaacgaacccacattacctgcggtcttccctccagcggctggtgttgccgtggtttgcgccggggatgccgtctgtactggagccgtagtcgccgtctcttttggtgctggcgtagaagtcgcagccggtgccttcgtgctcgccacaggagcagctggttcagtacgcttcggcgtctgtgctaccggcttcggttccgttttcacggttgcttgcggttttttcggttcaatcaccgcctgctgacgagctggacgcgtagtggccggacgttcagcagtttgcgttttcgccgtgtcacgcgatgcattgccattgcgtactggcgcgacagttgctggttcagtcggcaatgtagaattgaccgccacattgttcaactgttgctgattttgtggctgggtcagcgcattgttcaggtcaccctgcacttcaacacgttgttgaccatccgttgccgccggggtttgcccttgagtcggcgtagaagagatcggtggcagagaaacatcctgctgagtattttccgcagacgtggttcccggcgctggctgcacgccattcgcctgatcggtcgcattgccagcaagatcaatactcttctcgccagacgcggtttgatcgctggaagtggtcgagggggcttttagcgcagaaccgataccgatgatcaacagcagtagaaccagaatgccgacgcccatcatcatatactgacgagaagcgggtttactggctgcttttttgcgcttacgcggacgacgctctacgcgctcttcatccacggtttcatcttcggattcgtcaatttcttcttcgatttccggttcctcattgcgctctttttgcgcacgagtcggacggcgatcgtcagtgtcatcaagttcaatatcatcaaaattgatctgcggttcgccacgttcagtacgctcagaacgttcagaagattgacgagaacgaccagtacgacgatcgctgggatcgggtttcagctcgtcttctggtttgaattcatccatttaacaccccactaaaaggttaatgcttaccacgttgcaattaacctgaagctaatagaccgcttgataagcggcctgacctttcttgttgttacgctgattgacaatcggcaatggcgttaagaacaagctcgtgcgaaacgccgctgcgaacttcactcttaccaattgccaacggaagaattaagcgcatctctcccgcaaggactttcttgtcacgcagcatatgcggtaaatacgcctgcgcggacatttcgcgcggcccattgaccggtaacccagcccgcgtgagcagagttataatacgctgcgtttcggcagaactaaactgcccgagacgttccgacgtccgcgccgccatcaccatacccgcagcgaccgcttcaccatgtaaccaattgccataccccatttcagcttcaatggcatgaccaaaggtgtgtcccagattcagtaaagcacgtaacccggtttcgcgctcgtcggcggcgacaacttctgccttcagttcacaacaacggcgaatacagtacgccattgccggaccgtccagacgcaacaacgcatccagattctcttccagccagttaaaaaacgtaccgtcaagaataatgccgtatttgatgacttctgccagccccgacgctaactcacgcgggggaagcgttttcagacagtcgagatccaccaccactgaagcaggctggtagaacgcgccaatcatgtttttaccgaggggatggttgaccgcagttttgccgccaacggaggaatcgacctgcgacagtaacgtcgtcgggacttgaatgaaacgaacaccgcgctgataactcgnnnnngcgaagccggtcagatcgcccactacgccgccgccaagcgccaccagcgtagtatcgcgaccatgcggcttttgtaacaacgccgtaaagacggtatcgagtacagccaggcttttatactgctcgccgtcaggaaggataacgctatcgacgttaacacccgcctgttcaagtacgccgcggaccttatcgagatacagaggagccagggtttcgttggtgaccaacatgacctgctcgcccgatttcagcggtaagaatgaagctggttcattaaacaaaccagatgcgatggtaattgggtaactacgttccccgagagtaacgacaatcctctccataacgcgacatccaccttaattactgtacccgcagacgagtgtatataaagccagaattagttgctttccagcatgtgaataatctggtttgcaaccactttagcgctttgatcatcagtacgaatggtcacgtcggcaatctcttcatacagcggattgcgttcattggccaacgcttccagaacttcacgcggcggtgtttcaacgtgcagcaacgggcgttttttatcacgctgcgtgcgtgcaagttgcttttcgatcgtcgtttcaagataaacgacaacgccacgagcggaaagacggttacgcgtttcacgggatttcacagagccgccgccagtagccagcacaataccctgtttctcggtcaactcattgatgaccttttcttcgcgatcgcggaagccttcttcgccttctaaatcgaaaacccagcccacatcagctccggttcgtttctcaatctcttgatcggaatcgtaaaattccatattgagttgttgagctaactggcgcccaatagtgctttttccggcacccataggcccaaccagaaagatattgcgtttctctgccattttttcggtactactaagactattcgttaatgataaacccgcttcgctcagagagctccgcaggacatgaactgaaacctcataagatattgcgagagtcagactgaaaattatctcaatactccagcgggtttggcaactgaataaatcacccatccctctgcatatctggtcgctgcaagcgcgctgccttgctaccaccgctctggcgataaatcaccgggtaagattagcgtaaaaaagacagcaaaatgccgcctgaatgataaatcatcatcatggaaggcaggcagcgaagagcaccaactctcaaatcggtactccttgtatgctaaatacctgcgcgcgtcaaatagatgaaacacgttcagcgtaaaaacattaccgcttttacggctgtttactcactggaaaccagtcgtggcgtgataaacaccactaactcgcgtcgttcatcttcttttccgtcatgacgaaataattgcccgaaccagggaatgtcgccaagcaacggcacgctatcctgacccgatttatttttacgggtaaaaatgccgcccagcgccaacgtttctccgcttttgacctcgacctgcgtttcgatctcctgcttatcaatcgccagcacttcgccatcggcctgctgtagcacctgccccggaacgttctggctgatgtgtaatttcagccggatgcgacctttttgtaacaccgtgggcgtgacctccatccccaggacggcctctttaaattccaccgacgtcgcgccactttccccgctggaaacctgatatggaatttcgctcccctgtttaatgctggcaggctgaagatgtgaggccagcagacgcggactggcgataatatccagctgctgtttttgttcgagcgcggaaagctcaagatccagcaaacgtccgttgatgcgcccaatgttaaaaccgacatgcgttgtcgccgtcgctacggagaggtcgctaccaagcgtggtgacttgcccaacgccaccagcgtgttgcgcatcggccagcgtccatttcacgcctaactcacgcaaacttttttcattaatggtgacaatatgcgccgacagctcaacctgcccgaccggcagatccatttgcgctacccactgttcaagggcgcttaacgccgttttgttatctcgtagcaaaaggcgattggtgcgtttatcgacggtcatactccctttggcactcagtagcttctccccagctttcgccagctctccggcgtcggcgtattgcagagtaatattgcgattttccagcggcagatttgcctgcgcccgcgcctgctccgcttcctgacgggcgatattgtcattctgccaggcaatggaatgcactgagagaatgttgccctcctggcgcgttatcagtccggcgcttttcactacagtttgtagtgcctgcttccagggaacatctgttagatgtaacgacaccgtaccgctgacgtctggcgacaccaccaggttcaacttctcctgttcagccagcgcctgcaacacctgagctaccggaacgtcatccaccatcagcgtcactttttgcggcnnnnccgcctgtacgccgggtatcagcatcaacagtagtgcggctatccattgcttcatttgtatctccttgccgttgccacaaccattgtggcggttcgcagtttgtcccggtacccagcgttagtacgtctggcgtcagctgtaaaattgtccagccgttttccagcacatcgttttgctgcacccgtcgccatttcttttgcccgtcttttattacaccgatgatgcgctcgcctcgccctaccatcccctgatagcgccactggctaagttcgctaatccggcatagatcttccggcggtttaaaagggtcacgcataccggttaaaaggcacaatgcaatacctgccaacaaccagcgtttaaccctcatgcggcgtctccagttgtagggtgaacaaaagatcatcaccttccacgcttaatgaaaaacggctcacgctgacgttgcgctctgccagccgtgtaaatgccgacggcactgcttcccacagcgttttcaacgccaactcgcctccctgcgcggatggatgccagaaaaccagttgtgcgccgggcaactgaaaatccagtggcgaaaagggcagcgttttttcttcgctgaagggagtggtgtcaaccaggcgatacagtgtggcccaatgctgatgatgacttgcccgtagtcgaattaatgcgtcgcgctcttcatggtgtgtcgatgacagaaaaatgagcgtaactaacatcagcaaccagaatgcccagcaaaactggcggaggcggggtgatgtggcgaaccaccagtcaaagaacatgttcatcgctaaccttccttgttaactgatactcaaattgccagcgtccctgcgcatcctgctgcgtggccccccgctgattgagatgaaaagatgcatcctggcggagtgacgtttctagtgcgtttaacgcggtaatgcttgttgtaagccccttgatctccagcgttccctgctgccagcttatcgttgtcagccaggcgtgctcgggtaaaagcgccgccagtgcttccagcgcagattgccagtcgcgggtaaattgtcgctggcgctgcctttgcaaacgctgctcacgaatttgttggcgctccagcaaacgtggtttcgttatctgtaagctgcgggcgagttgttgttccccctgaagcaaaacggcgtctacgcgagcttcggcgctgcttgtcagacgcagtattagcgttatcccgacggccagcagcagaggcgcaacgaacatcagcaaccagaaacgaagaaaagcggtccggcgttgctgtcgccagggcaaaaaattaattggcgggttcatcagtacgccttcccaagcgccagcccagcgcgatggcaaagtctccacctggcggcggtaacggcggctgacgaacagaaacggcctcccaaggatcaaatccgccttcgccacatatcgcgacgctttcgggatcaacggataacgctgccgccagctccttcgcgctagtcatccccaccgccagtttgcgcccccagcgatagcgcgtcgcccacagccactgttcgttatcacgccaggccagacattgctgatgagaaggtaaaaaaggcaggaatcgctgtaatgcactggcatccggggtgatcgcactaacatgaacacgcaacctttctgccaaagtaagcagcgttgccagctctttgctttgcgcggcagtcacgttataggcgggactgagtgagtcttcgctgtaatcgaagcgcagggagtccggatccatatccagctcgcgagccatcgtcccggacagccaggccgtttgctcccgctcaccgagggacatcgacgggcgcggaaatgaccgctgtaatgtgcgactggcgggaaacgccaacatgatgtgatggcgctgcggcagttcgcgactccacggtaacaacgttttagccagccgctgcgcatcaacaatccgcccatctttgataatgtcgtgcgccagcggcaaccgccaccagcgttgcaaaaagcattcttttgcgccccgcacaatagcaaccgctaccgcttcttgctgttgtaaatgcaaaccaatttgccagatcttaaatgccattgtgatgatctccttatcacccgtcactctgacgggtatatcaatgcgtctggcttgcctttatactaccgcgcgtttgtttataaactgcccaaatgaaactaaatgggaaatttccagtgaagttcgtaaagtattttttgatccttgcagtctgttgcattctgctgggagcaggctcgatttatggcctataccgctacatcgagccacaactgccggatgtggcgacattaaaagatgttcgcctgcaaattccgatgcagatttacagcgccgatggcgagctgattgctcaatacggtgagaaacgtcgtattccggttacgttggatcaaatcccgccggagatggtgaaagcctttatcgcgacggaagacagccgcttctacgagcatcacggcgttgacccggcggggatcttccgtgcggcaagtgtggcgctgttctccggccacgcgtcacaaggggcaagtaccattacccagcagctggcgagaaacttcttcctcagtccagaacgcacgctgatgcgtaagattaaggaagtcttcctcgcgattcgcattgaacagttgctgacgaaagacgagatcctcgagctttatctgaacaagatttaccttggttaccgcgcctatggtgtcggtgctgcggcacaagtctatttcggaaaaacggtcgaccaactgacgctgaacgaaatggcggtgatagccgggctgccgaaagcgccttccaccttcaacccgctctactcgatggatcgtgccgtcgcgcggcgtaacgtcgtgctatcgcggatgctggatgaaggatatatcacccagcaacagttcgatcagacacgcactgaggcgattaacgctaactatcacgcgccggagattgctttttctgcgccgtacctgagcgaaatggtgcgccaggagatgtataaccgttatggcgaaagtgcctatgaagacggttatcgcatttacaccaccatcacccgcaaagtgcagcaggccgcgcagcaggcggtacgtaataacgtgctggactacgacatgcgccacggctatcgcggcccggcaaatgtgctgtggaaagtgggcgagtcggcgtgggataacaacaagattaccgatacgctgaaggcgctgccgacctatggtccgctgctgcctgccgcagtcaccagcgccaatcctcaggaagcgacggcaatgctggcggacgggtcgaccgtcgcattgagtatggaaggcgttcgctgggcgcgtccttaccgttcggatactcagcagggaccgacgccgcgtaaagtgaccgatgttctgcaaacgggtcagcaaatctgggttcgtcaggttggcgatgcatggtggctggcacaagtgccggaagtgaactcggcactggtgtcgatcaatccgcaaaatggtgccgttatggcgctggtcggtggctttgatttcaatcagagcaagtttaaccgcgccacccaggcactgcgtcaggtgggttccaacatcaaaccgttcctctacaccgcggcgatggataaaggtctgacgctggcaagtatgttgaacgatgtgccaatttctcgctgggacgcaggtgccggttctgactggcagccgaaaaactcaccaccgcagtatgccggtccaattcgcttacgtcaggggctgggtcagtcgaaaaacgtggtgatggtacgcgcaatgcgggcgatgggcgtcgactacgctgcagaatatctgcaacgcttcggcttcccggcgcaaaacattgtccacaccgaatcgctggcgctgggttcagcgtccttcaccccaatgcaggtggcgcgcggctacgcggtcatggcgaacggcggcttcctggtggacccgtggtttatcagcaaaattgaaaacgatcagggcggcgtgattttcgaagcgaaaccgaaagtagcctgcccggaatgcgatattccggtgatttacggtgatacgcagaaatcgaacgtgctggaaaataacgatgttgaagatgtcgctatctcccgcgagcagcagaatgtttctgtaccaatgccgcagctggagcaggcaaatcaggcgttagtggcgaagactggcgcgcaggagtacgcaccgcacgtcatcaacactccgctggcattcctgattaagagtgctttgaacaccaatatctttggtgagccaggctggcagggtaccggctggcgtgcaggtcgtgatttgcagcgtcgcgatatcggcgggaaaaccggtaccactaacagttcgaaagatgcgtggttctcgggttacggaccgggcgttgtgacctcggtctggattggctttgatgatcaccgtcgtaatctcggtcatacaacggcttccggagcgattaaagatcagatctcaggttacgaaggcggtgccaagagtgcccagcctgcatgggacgcttatatgaaagccgttcttgaaggtgtgccggagcagccgctgacgccgccgccgggtattgtgacggtgaatatcgatcgcagcaccgggcagttagctaatggtggcaacagccgcgaagagtatttcatcgaaggtacgcagccgacacaacaggcggtgcacgaggtgggaacgaccattatcgataatggcgaggcacaggaattgttctgattaaaaaggcgcttcggcgccttttcagtttgctgacaaagtgcacttgtttatgccggatacgggtgaacgcgttatccggctaacaaaatcgtgaaaactcaatatattgcaggaaccccataagcctgataagcattgtgcatcaggcaaacttcacgcatttacactcgcccctgccctttcaaccattcgcgcacgaggaacagcgcgctgacattacgcgcttcgttgaagtcagggtcttccagcaaatccatcatatgcgccagcggccagcgcacctgtggtagcggctctggctcatcgccttccagcgattccgggtagagatcttgcgctaccacgatattcattttgctggaaaagtaagacggtgccatgctgagcttcttcaaaaaagtcagatcgttcgcaccaaatccaacctcttcttttagctcgcggttagcggcttcgaagacgctttcacccggatcaattaatcctttcgaaaaacctaattcgtaggattcagttcccactgcatattcgcggatcaggatcaggtgatcgtccacaatcggcacaatcatcactgcttcccggttggttggacgcattcgttcataaacacgccgcacgccattgctgaactctagatccacgctctcgacggtaaacagtcgggaacgggctacagtttcaacattcagaatggtgggtttttgtaatgatttgctcatcgtgggatctatgctgtgaaatcagcggttattgtgcgatatcggacacgctttcggcaatgtgaattgcatgttatttacatttatgtaacttaataaataatcgtcctcaaatcaaattaaaagtcaataggttgaaataactccaggaatttgctgatattccgccttcagagggtttgctatgatcagcggttactgtgatgtgcttaatgatgctcaagttaaactccacgcttgccgatagccaaccgcagaatcatgtattgtgtccggtgcgactgaccacgcctgacagactaagtaagatggggaaagcatgagcaccattgtgatttttttagctgctttgctggcctgctcactacttgcgggatggctgataaaagtgcgatccagacggcgtcagctgccctggaccaacgccttcgcggatgcgcaaacgcgtaaactcacacctgaagaacgtagcgccgttgaaaattatcttgagagcctgacgcaggtattacaggtgcctggcccaacgggagccagcgcggcaccgatctctctggcgctgaatgccgaaagcaacaacgtcatgatgctgacacacgctatcacgcgttacggcatctctaccgacgatccgaataaatggcgttactacctcgattcggtagaagtccacctgccccctttctgggagcagtacatcaacgatgagaataccgttgaactgattcataccgattcgctgccgctggttatttcactcaacggtcatacgctgcaggagtacatgcaggaaactcgcggctatgccttgcaacctgttccgtccacgcaggcgtcgattcgcggggaagagagtgagcaaatcgagctactcaatattcgcaaagaaacgcatgaagaatatgcgctgagtcgtccgcgcgggctgcgtgaagcgttgctgatcgtcgcctccttcctgatgttctttttctgcctgattaccccggatgtatttgttccgtggctggcaggcggcgcgttactgctgctgggcgcaggtctgtgggggctattcgcccccccggcaaaatcctccctgcgggaaattcattgtctgcgcggtacaccccgtcgttggggattgtttggcgaaaacgatcaggaacagatcaacaatatttcactcggtattatcgacctggtctatcccgcacactggcagccatacattgctcaggatctcggtcaacaaaccgatattgatatctatctcgaccgccacgtagtgcgtcaggggcgatatctttcgctgcatgatgaagtaaaaaactttccgttacagcactggctgcgcagtacgattatcgctgcgggctcgctgctggtgctgtttatgctgttattctggatcccgctggatatgccgctgaaattcactctctcatggatgaaaggtgcgcagaccattgaagccaccagcgtaaaacaactggctgacgctggcgtgcgggtaggcgatacattgcgtattagcggtacgggaatgtgtaatattcgcacttccggaacctggagcgcgaaaaccaattcaccttttttaccgtttgactgctcgcagatcatctggaacgacgcccgctcattaccattaccagaatctgaactggtcaacaaagcgacggcattgactgaagcagttaatcgccagctgcaccctaaaccggaagatgaatctcgcgtcagcgcctcattacgttcagcaattcaaaaatccggcatggtattgcttgatgattttggcgacattgtactgaagacagcggatctgtgttctgccaaagatgactgtgtgcgactgaaaaatgcgctggtcaatctcggcaacagtaaagactgggacgcgctggtaaaacgcgccaacgccgggaagctcgatggcgtgaatgtgttattacgcccggtgagtgcggaatcgctggataacctggtggcaacctccaccgcgccgtttatcacgcatgaaacggcgcgagcggcacaatcactaaacagtccggcccccggcggattcctgattgtcagcgacgaaggcagcgattttgttgatcagccctggccttcggcatcactttacgactacccgccgcaagaacagtggaacgctttccagaaactggcacaaatgctgatgcatacgccgtttaacgccgagggtatcgtcacaaaaatcttcactgacgccaatggtacgcagcatataggccttcatccgatcccggatcgttccggcctgtggcgctatctcagcaccacgctgctgctactgacgatgctgggtagcgccatttataatggcgtacaggcctggcggcgttaccagcgtcatcgcactcgcatgatgaagattcaggcctattatgaaagctgcctgaacccgcaactgatcaccccttcagaaagccttatcgaataacacgtttgcgcggcaggttatgctaccctgtcgcgcaaattgcttcactctggagattttcctcatgcatatcaacattgcctggcaggacgtagataccgttctgctggatatggacggcacgttgctcgacctcgccttcgataactatttctggcaaaagctggtgcctgaaacatggggcgcgaaaaacggggttacgccacaggaagcgatggaatatatgcgccagcaatatcacgacgtacagcatacgctaaactggtactgtcttgattactggagtgagcaactgggtctggatatctgtgcgatgaccaccgagatgggaccgcgtgccgtactgcgtgaagataccattccgtttcttgaggcactgaaagccagcggtaagcagcgaattttgctcaccaatgcgcatccgcacaacctggcggtaaaacttgagcataccggtctggacgcacaccttgatttattactttccacccacacatttggttatccgaaagaggatcagcggttatggcatgcggtggccgaagctacgggtctgaaagctgaaagaacgctgtttattgatgacagcgaagcgattctcgatgctgccgcgcaatttggtattcgttactgcctcggcgtgactaatcctgactcagggattgccgagaaacagtatcaacgccatccgtcactgaatgactaccgccgcctgatcccctcgctaatgtgaaggagacgccatgaaagaaaaacctgctgttgaggttcgactggataaatggctatgggctgcccgtttttataaaacccgcgcgctggcccgtgaaatgattgaaggcggtaaggtgcattacaacgggcagcgcagcaagccgagcaaaatcgtcgagctgaatgccacgctcactctgcgccagggaaatgacgaacgcacggtgattgtaaaggcgattactgaacagcgtcgccccgccagcgaggcagccttgctgtatgaagagactgcggaaagtgtagagaaacgcgaaaaaatggcgctggcacgtaaacttaatgccttaaccatgccgcacccggaccgacgcccggacaaaaaagagcgccgcgacctgttacgatttaaacacggcgacagtgaataactgtcacctgcaagagagatgattatgccgcaacatgaccaattacatcgctatctgtttgaaaactttgccgtgcgcggcgaactggtaaccgtttcggaaaccctgcaacagatccttgagaatcacgattatccgcagcccgttaaaaacgtgctggcagaactgctggttgcgaccagcctgttaaccgctacgctgaagtttgatggtgatatcaccgtacagctgcaaggcgacggtccgatgaatctggcggttattaacggtaacaacaaccagcagatgcgcggtgtggcgcgcgtgcagggcgaaattccagaaaatgccgacctgaaaacgctggtcggcaatggttacgtggtgatcaccattaccccgagcgaaggtgaacgctatcagggcgtggtgggtctggaaggtgataccctggcggcctgcctggaagattactttatgcgttctgaacagctgccgacgcgcctgtttattcgcaccggcgacgtagacggcaaaccggctgcaggcggtatgttgttgcaggtaatgcctgcgcaaaatgcccagcaggacgactttgaccacctggcgacgctaaccgaaaccatcaaaaccgaagaactgctgaccttaccggcaaacgaagtgttgtggcgtttgtatcacgaagaagaggtgacggtttacgatccgcaggatgtggagttcaaatgcacctgctcgcgtgaacgttgcgccgatgcgctgaaaacgctgcctgatgaagaagtcgatagcatcctggcggaagatggcgaaattgacatgcattgtgattactgcggtaaccactatctgttcaatgcgatggatattgctgaaatccgcaacaacgcgtctccggcagatccgcaagttcattaatgagtatgtccggcagagagagctctgccggattttacgactaatacacctgatgcgctttgtcactcattcagattcacatccagcctttcaccatccactacaagatcgcgccacgctttaggcttcgttcccagttttccatccttcgcagctgtgagtaatttttctttcgttatatcacgcggaagtaaactcatcgtaagctcttgccattctttcttgtcaggatcaaagccatagacaatgtatctttcatcatcaaaggcaaagaggatccgctctgccctgccatcactattcagatcttgctcgaccagtacgcaggcgtctttttcaatacaggtcatcacgttatagcgatcctggattaaggccgaccagaatgtcgcatccggtttaccagaaccaggggcaattaacacattttcggctaatactttttccgatatctgttgctgaagatgttgctctccatctaacgccatcagtagatcccgcgcgcgtttcgggtctttcatatactcggcatcgcttttcagcgactcaagcgccgcacgtccatagcgaccgctgtgttcgagcatgtagatagttacctggtctggcgtgtttttgccgctctgataacgcgccatatgactgttcacactaatgcgcatactgtccagcaccggcgaattaagaagcaccagtattaccaacaccaataacgaaaccgcaaggttcactttgccctgaagaacaaggggattttgccctttacgccagacgatactgacaaaataccccagcgaccataccagtaacaccagcaccgccagcgcgccctgcaagcggtcgacagtccagccgtactgagcgacccgcagccataacgcccaggcggcgatgaacacatacagcggagcaaccagcagagcggttttaatcaggcaacgcaacggccccgtccagggaagtgacgctttttgcggatcgcggacaatagccattaagatcaattgcaaaaaggccagcgttaacagcaacccggcggcggagatgtggcgagaaatcgcactcaggcctgtaaacggcagggtgatgataaacatcagggttagcaatgatactaacggcagcaaccccgtggcgattaacgtgaacaacttttgaatagagtcgattaaacgtgactgtgttcgcgcgaggatcaccgccagcgcggtaaccagacctaacgtgagataaataaaccagtcggttgcaaaaaagagcgttttgaaaaacgtgatgccaacaagtttaaacaactcactccacagtaaaagcaccagccacgtcagaccattggcgagaaaaatcaccagtaatataagtacgttatgccatactgactggtaaaaatagcgatagcggctactgtcattgcggatgcgaaggctttgttgtatccacggtagcaacaacattgccatcagcagcagatagcaaccaaaatcccaaagcgccttttcagctctccaggggttcatgccatcagtttgccacttcagccagccgctcatccccagcgtggcaataaacaccagcgccagccatccccaaaggcgcttctgtttaaaagagatcacggagaagagtaaaacggatgaaaacgcgacggtcgcaggcacgccataaacaatccaactgtgattttttccggaaagccaggcgatcagcaggtagcaaaccagaccctgaagtaatccggtagcaatcatcccccagcgtgttgcgggtgaaagttcaacgttatccatgttggttatccagaatcaaaaggtgggttaattatcgcatccgggcagtagtattttgcttttttcagaaaataatcaaaaaaagttagcgtggtgaatcgatactttaccggttgaatttgcatcaatttcattcaggaatgcgattccactcacaatattcccgccatataaaccaagatttaaccttttgagaacattttccacacctaaaatgctatttctgcgataatagcaaccgtttcgtgacaggaatcacggagttttttgtcaaatatgaatttctccagatacgtaaatctatgagccttgtcgcggttaacacccccaaaaagactttactattcaggcaatacatattggctaaggagcagtgaaatgcgcgttaacaatggtttgaccccgcaagaactcgaggcttatggtatcagtgacgtacatgatatcgtttacaacccaagctacgacctgctgtatcaggaagagctcgatccgagcctgacaggttatgagcgcggggtgttaactaatctgggtgccgttgccgtcgataccgggatcttcaccggtcgttcaccaaaagataagtatatcgtccgtgacgataccactcgcgatactttctggtgggcagacaaaggcaaaggtaagaacgataacaaacctctctctccggaaacctggcaacatctgaaaggcctggtgaccaaacagctttccggcaaacgtctgttcgttgtcgacgccttctgtggtgcgaacccggatactcgtctttccgtccgtttcatcaccgaagtggcctggcaggcgcattttgtcaaaaacatgtttattcgcccgagcgatgaagagttggcaggtttcaaaccagactttatcgttatgaacggcgcgaagtgcactaacccgcagtggaaagaacagggtctgaattccgaaaacttcgtggcttttaacctgaccgagcgcatgcagctgattggcggcacctggtatggcggcgaaatgaagaaagggatgttctcgatgatgaactacctgctgccgctgaaaggtatcgcttctatgcactgctccgccaacgttagcgagaaaggcgatgttgcggtgttcttcggcctttccggcaccggtaaaaccaccctttccaccgacccgaaacgtcgcctgattggcgatgacnaacacggctgggacgatgacggcgtgtttaacttcgaaggcggctgctacgcaaaaactatcaagctgtcgaaagaagcggaacctgaaatctacaacgctatccgtcgcgatgcgctgctggaaaacgtcaccgtgcgtgaagatggcactatcgactttgatgatggttcaaaaaccgagaacacccgcgtttcttatccgatctatcacatcgataacatcgttaagccggtttcaaaagcgggtcacgcaacgaaagttatcttcctgaccgcagacgcctttggtgtgctgccaccggtttctcgtctgactgccgatcaaacccagtaccacttcctctctggcttcaccgccaaactggccggtactgagcgtggcatcaccgaaccgacgccaaccttctccgcttgcttcggcgcggcattcctgtcgctgcacccgactcagtacgcagaagtgctggtgaaacgtatgcaggcggcgggcgcgcaggcttatctggttaacactggctggaacggcactggcaaacgtatctcgattaaagatacccgcgccattatcgacgccatcctcaacggttcgctggataatgcagaaaccttcactctgccgatgtttaacctggcgatcccaaccgaactgccgggcgtagacacgaagattctcgatccgcgtaacacctacgcttccccggaacagtggcaggaaaaagccgaaaccctggcgaaactgtttatcgacaactttgataaatacaccgacacccctgcgggtgccgcgctggtagcggctggtccgaaactgtaatgatttgaagctggagaatatctatccagtatcttatagaaagcaaaacgggaggcaccttcgcctcccgtttatttacccttcttttgtcgtgccctgcgcccgcgttaccggcacaggcagccaggcgcgaatggaaagcccgccccgctcgctggtgccaagctccagcatcccgttatggttatccacgatacgctgcacaatcgccagccctaatcccgtgccgctaatggtgcgtgcactgtcgccgcgaacaaacggctggaaaaggtgcttacgttgttccggcgcaattcccggaccgtcatcttccacctggaaccaggcgcgattcggctccgtcccgctgctgactttgatccagccattgccgtaacgggcggcgttgaccaccatattcgccaccgcgcgtttgatcgacagcgggtgcattttcacttcaatgctgccggggtaaagcgcggtttcaatttcccgctcatagccactttcggcagcaataacctcaccgagtactgcgttgagatccgccatttccatcggcatctcctgtccggtgcgcaggtagtcgataaactgctcaatgatggcattgcactcctcgatatctttattgatcgattctgccaggtagccatcctgctcgctcatcatctcggtcgccaggcgaatacgcgtcagcggtgtacgcaagtcgtgacttacccccgccatcagcagcgtgcggtcatccgccagttgcttaacaccagccgccatatggttaaaggcgcgggtaacggaacgcacctcggacgcgccatactcacgcagcggcggcggaataatccctttaccaacctgcaaggctgcgtgttcgagatcgaccaacggtcgattctggatacgaataaacagccacgccccgcctatcgccaatagcataatcgccaacgtatagcggaacagcggagagaaatcgccctgatgaatttcggtcagcggcacgcgtacccagatattgggcgacagccaggttttcagccagacgacaggcgaacttttgttgacctcaacgcgcacttccgtcgggccgcccagttgctgtgccatctgatggcttaagaattcatagtgttgcgcccaacgcagacctgcctcttcggcagcctcgttggagtagagagagatccccagctcacggtagatctcccgacggaaagcgggaggcacaaccaactgcgtgccgtcctccagttgcagtttgtcggtcatcaacatacgcacttcgtacgcgaggactttattaaactgctggaggctcggcaaaatcgcgaagttcagcaccaccagataagtcgtcaccaggctggcgaacagcaaggtgacgatgagcaataacgtacgggcaaatgaacttcgtggcgagaagcgcaatcgcctcatgctttagagccgtccggtacaaagacgtagcccaggccccaaacggtctgaatgtaacgcggatgcgctggatcttcttccaccatgcggcgcagacgagaaatctgcacgtcgatggagcgttccattgcggaatattcacgaccacgggcaaggttcatcagcttatcgcgggagagcggctcacgcggatggctgaccagtgccttcagtaccgcaaactcaccgctggtgagcggcatcggctcgtcttcgcggaacatttcgcgcgtaccgaggttaagtttgaacttaccgaaagcaattaccgcctcttcctgtgacggtgcgcctggtagctcgttcgcctgacgacgcagcaccgcacggatacgggccagcagttcacgcgggttaaacggttttggaatgtaatcgtcagcgccaatctccaggccaacgatacggtccacttcttcccctttcgccgtcaccataatgatcggcatcgggttgctctgactacgaagacgtcggcaaatcgacaagccatcttcaccaggtaacattaaatccagtaccataagatggaaagattcacgagtcagcaggcgatccatctgttctgcattagcgacgcttcgaacctggaagccttgttcggtgagataacgttccagcagcgcacgcaggcgcatgtcgtcatcgaccaccagaatcttgtagttctcttgcattgtttgtactcccaaaggttcgcaacaatttgtaagcgtgtattcttaaaaaagctcacgttcgtcaccagctaaatctggtatgaatttcagcctaaattgttacaaagcatattaaacagcagcttaagtatacaatttattcggcgaaacattattgattctgttgatatgatcacgttatacccaatgtgcgcattatcaaacagacaaagggaatcaacgagatgaaaacgcccctggttacccgggaagggtatgaaaaactcaaacaagagcttaattatctctggcgtgaagaacgcccggaggtcacaaaaaaggtgacctgggccgcaagtctgggcgaccgcagcgaaaatgctgactatcagtataataaaaagcgcctgcgtgaaatcgaccgtcgcgtgcgctatctcactaaatgcatggaaaatctcaaaatcgtcgattactccccgcagcaggaaggcaaagtcttttttggcgcgtgggtggagattgaaaacgacgatggcgtgactcaccgtttccgtattgtcggctacgatgaaatttttggccgtaaagattacatctctatcgattccccgatggcccgcgcattgctgaaaaaagaagtcggcgatctggctgtggtgaatactcctgccggggaagcgagctggtatgttaatgctatcgagtacgtgaaaccgtaaggaagagtcttaacctcctgccgatggctggcatttttgccagccagtccgtataactatcccctgatttttgatccgaaaagatgaactcaaaccatgatgaatgattcgttctgccgcattattgcgggtgaaattnnnnngcgcccggaacaggttgacgctgccgttcgcctgcttgacgaagggaataccgtgccttttattgcacgttatcgtaaggaaatcaccggcggtctggatgacacgcagctgcgtaatctggaaacgcgtctgggatacctgcgcgagctggaagagagacgtcaggcgatcctcaagtccatttccgagcaaggcaaactcaccgatgatctggcgaatgccatcaacgccaccctaagcaaaaccgaactcgaagacctctacctgccctacaaacctaaacgccgcacccgcgggcaaatcgccattgaagcagggcttgagccgttggctgacctgctgtggagcgatccgtcacacacgccagaagtcgccgctgcgcaatatattgatgccgataaaggcgtggcagataccaaagccgcgctggacggcgcgcgctatatcctgatggaacggtttgccgaagatgccgcgctgctggcgaaagtgcgtgattatctgtggaagaacgcacatttggtttctacggtggtgagcggtaaagaagaggaaggggcgaaattccgcgactatttcgatcatcacgaaccgttgtccacggtgccttctcaccgcgcgctggcgatgttccgtgggcgtaacgaaggcgtacttcagctttcgctgaatgccgatccacagttcgatgagccgcccaaagagagctattgcgagcaaatcatcatggatcaccttggcctgcgcctgaacaatgccccggcggatagctggcgcaaaggcgtggtgagctggacgtggcgcatcaaggtgctgatgcatctggaaaccgaactgatgggcaccgtgcgcgaacgtgcggaagatgaagcaatcaacgtctttgcccgtaacctgcacgatctgctgatggcggcccctgccggactgcgtgcaacgatgggcctcgatccgggtctgcgtaccggggtaaaagtggcggtggtcgatgccactggcaaactggtagcgaccgataccatttacccgcacaccggacaagccgcaaaagcagcgatgactgttgctgcgctgtgtgaaaagcataacgttgaactggtggcgatcggcaacggtacagcttcccgcgaaaccgaacgtttctatctcgacgtgcagaagcagttcccgaaagtgaccgcacagaaagtgatcgtcagcgaagctggcgcgtcggtttactcggcttccgagctggcagcgcaggagttcccggatctcgacgtttcgctgcgtggcgcggtttctatcgcccgccgtttgcaggatccgctggcggagctggtgaaaatcgatccgaaatctatcggcgtaggtcagtatcagcatgacgtcagccagacgcaactggcccgcaaactggatgcagtagtagaagactgcgtaaacgccgttggcgtcgatctcaacaccgcttctgttccgctattaactcgcgtggcgggcctgacgcgaatgatggcgcaaaacatcgtggcctggcgcgatgagaacggccagttccagaaccgtcagcaactgctgaaagtcagccgtctggggccgaaagccttcgagcagtgcgcgggcttcctgcgcattaaccacggtgacaacccgctggacgcctctaccgttcacccggaagcctatccggtggtggaacgcattctggcagcaacacagcaggcactgaaagatctgatgggtaacagcagcgaactgcgtaacctgaaagcgtctgactttactgatgaaaaattcggtgtgccgacagtaactgacatcatcaaagagctggaaaaaccgggtcgcgatccgcgtccggaatttaaaaccgctcagtttgccgatggcgtcgagacaatgaacgacctgcaaccgggtatgatcctcgaaggcgctgtcaccaacgtcaccaactttggcgcgtttgtcgatatcggcgtgcatcaggacggcctggttcacatctcttcattgtcgaacaagtttgtggaagatccgcataccgtggtgaaagcgggcgacattgtgaaggtgaaagtgctggaagtggatcttcagcgtaaacgtatcgccctgactatgcgtctggacgagcagcctggcgaaaccaactctcgtcgcggcggcggtaacgatcgcccgcaaaacaaccgcccggcagccaaaccacgcggtcgtgaagcgcagcctgccggtaacagcgcgatgatggacgcgctggcggcagcaatgggcaaaaaacgttaaacgcccggactggcccctaaacctgcgcgataaggcgttcacgccgcatctggcaacgaacgccttgcctgacataaaagtgccggagaatatctccggcatatttattccacagccaaactcacaatatatttcgttaatatttatcacttcattaacaactgaaaccttaattaaacattagccagtcctggtaattcgctattcgaattatattttcgctgcgatataaccttgagccacatcaacattgagtcagattattattcaaaccaacattcgcacacattttaagtattgctgatagaaaccattctcattatcattgtactgttgattatttaatctctccttcgttggcaaatcatctggtctcatgtcgctgtcaaacgccccatgaggtagttatccagttaatgagaaacaagtaggcacctatgcaatacactccagatactgcgtggaaaatcactggcttttcccgtgaaatcagcccggcatatcgccaaaaactgctttctcttggcatgttacctggctcctcttttaatgtggtgcgcgtcgctccactcggcgaccccattcatatcgaaacccgtcgtgtgagcctggtattacgcaaaaaagatctggccttattagaagtggaagcggtttcctgttaatacggtgataacaacaatgaaaaaattaaccataggcttaattggtaatccaaattctggcaagacaaccttatttaaccagctcactggcgcacgtcagcgtgtaggtaactgggctggcgttaccgtcgaacgtaaagaagggcaattctccaccaccgatcatcaggtcacgctggtggacctgcccggcacctattctctgaccaccatctcatcgcagacctcgctcgatgagcaaatcgcctgtcactacattttgagtggcgacgccgacctgctgattaacgtggtggatgcgtctaaccttgagcgtaacctgtacctgacgctacaactgctggaactcggcattccctgcatcgtggcactgaacatgctcgacattgccgagaagcaaaatattcgtattgaaattgatgctctgtcggcgcgtcttggctgcccagtgatcccgctggtttcaacccgtggtcgcggtattgaagcgctcaagctggcgattgatcgctataaagctaacgagaatgtggaactggtgcattacgcacagccgctactcaacgaagcagattcactggcaaaagtgatgccttccgacatcccgctgaaacaacgtcgctggctgggcctgcaaatgctggaaggcgatatctacagccgcgcctacgccggtgaagcgtcgcagcatcttgatgccgccctcgcccgtctgcgtaatgagatggacgatccggcgctgcacattgccgatgcgcgttaccagtgcattgctgccatctgtgatgtggtaagcaacaccctgacggcagaacccagccgtttcaccactgcggtagataaaatcgtgctcaaccgtttcctcggtctgccgattttcctctttgtgatgtacctgatgttcctgctggctatcaacatcggcggggcgttacagccgctgtttgacgtcggctccgtggctctatttgtgcatggtattcaatggattggctacacgctccacttcccggactggctgactatcttcctcgcccagggcctgggtggcggtattaacaccgtgctgccactggtgccgcagatcggcatgatgtacctgttcctctccttccttgaggactccggctatatggcgcgtgcggcgtttgtgatggaccgcctgatgcaggcgctgggcttgccggggaaatcctttgtgccgctgatcgtcggtttcggttgtaacgtaccgtcggtaatgggtgcacgtacgcttgatgcaccgcgtgaacgtctgatgaccatcatgatggcaccgtttatgtcctgcggcgcgcgtctggctatcttcgcagtattcgcggctgccttcttcgggcagaacggtgcgctggcggtcttctcgctgtatatgctcggtatcgtgatggcggtgctgactggcctgatgctcaagtacaccatcatgcgcggtgaagcgacgccgtttgtcatggagctgccggtctaccatgtaccacacgttaaaagcctgattatccagacctggcagcgtctgaaaggcttcgttctgcgtgctggtaaagtgattatcatcgtcagcattttcctgagcgctttcaacagcttctcgttgagcgggaaaatcgtcgataacatcaacgactcggcgctggcttccgtcagccgggtgatcaccccggtcttcaagccgattggcgtgcatgaagataactggcaggcaacagttggcctgtttacgggtgcaatggcgaaagaagtggtggtgggtacgctcaacaccctctacaccgcagaaaatattcaggacgaagagttcaatccggcggaatttaacctcggtgaagagttgttcagcgcggtagatgaaacctggcagagcctgaaagacaccttcagccttagcgtactgatgaaccccattgaagctagcaaaggcgacggcgaaatgggtaccggggcgatgggcgtgatggatcagaaattcggtagcgcagctgccgcatacagctacctgattttcgtcctgctgtatgtaccatgtatctcggtgatgggagccatcgcccgtgaatcaagccgtggctggatgggcttctccatcctgtgggggctgaatatcgcttactcactggcaacattgttctatcaagtcgccagctacagtcagcacccaacttacagcctggtgtgcattctggcggttatcctgtttaacatcgtggttatcggtctgctgcgccgcgcgcgtagccgggtggatatcgaactgctggcaacccgcaagtcggtaagtagttgctgcgcagccagcaccaccggtgattgccattaatggcttcacttattcaggtgcgtgatttgctggcgttacggggccgtatggaagcggcccagataagccagacattgaacactccacagccaatgattaacgccatgctgcaacaactggaaagtatgggcaaagccgtgcggattcaggaagaacctgacggctgcctctccggcagttgtaaaagctgcccggaaggaaaagcctgtctgcgcgagtggtgggcgctgcgttaaccatactccatcgcctgttttgaaaagcccggtatgcgtttgcatccgggcttttttgcgtgcggctttccataaaaatgcaattcttgcagcgcgacgtaagttcctctgaaagcgtctcgcagggatgaaaactggctaatgcacaggtgtggagtggcgcgtagagtcgcggcattcaaacaacaggtgaaggaacgccatgagcaaaaagcagagttccaccccacacgatgcgctgttcaaactctttttacgccaaccggagacggcacgcgattttcttgcgtttcatttaccagcacccattcacgcgctctgtgatatgaaaaccctcaagctggagtcgagcagctttattgatgacgatctgcgtgaaagctattccgatgtgctgtggtcggtgaaaacagaacaaggaccaggatacatctattgtctgattgaacatcaaagcacctcaaacaaactgatcgcatttcgcatgatgcgttacgctattgccgcaatgcaaaatcaccttgatgccggatacaaaacgttgccgatggtggtgccattgttgttttaccacggtattgaaagcccctatccctattcgctgtgttggctggattgtttcgccgatcccaaactggcaaggcagctttatgcctccgcatttccgctgattgatatcaccgtcatgcctgatgatgaaatcatgcagcaccgacgcatgacgctgctggagttaattcaaaaacatattcgtcaacgcgacctgatggggctggtagagcaaatggcctgcttattaagtagtggatacgctaatgacagacaaatcaaagggctgtttaattacatactgcaaaccggcgatgcggtacgttttaacgattttatcgacggcgttgccgaacgatcaccgaaacacaaggagagtttaatgactattgcggaaagattgcggcaggagggggaacaatccaaagccctgcatatagccaaaataatgcttgaatccggagtccctcttgcagacatcatgcgctttaccgggctgtcagaagaagagttggctgcggcgagtcantaaagttctgtctcgccattcaaaagtgcctacaccctctgcttcaacgccaccagcacgtgacgaaactcgaccggatgcgaaataaacggcgcatgagccgctttggcgaagatgtatgactcgctgtgtggccagagtttatccagcatcggcaccactttgcgcggcaccagaccatcgagatagccatacagtcgcaaaaacggcatgggtacgttttgcagcggcaagcggagatcaaccgttttgaggatttccagcccaccattgagcacgtcaacctccggcatcggtaacgccagaacggttttcttcaacgcccgcgcatcctgacgcgccgtttcagtacccatggtttgtaacgcaaggaaccgttccaccgtacgctgaaaatcatcactgagttgctgctgaaatcccgccagcacgtccggttttatccccggccactcgtcacgagcactaaaacaaggtgacgacgccacggtgaccagcgcctgaacacgctcgggatgggttaacgcaatctggcttgccaccagcccgcccagactccagcctaaccaaatggctttatctggtgcctgtcgcagcacggcttcggccatctccgcaagtgacagcgcaccaaatccccggctacgcccgaagccgggcaggtcaacaagatgcagcgtaaaatgcgagctaagttcctcgtcaatgcaacgccacacttcagcattcagtccccatccgtgcagcagcacaagatgaacattcccctgacctttggtctgccaccagatgttattcatccgctattgttctcttttgacttacaaggatgaacatatgctaacagtaccgggattatgctggctatgccgaatgccactggcattaggtcattgggggatttgttcggtctgctcacgcgccgcccgtacagataaaacgttatgcccacaatgtggattacccgccacacactcccatcttccctgcggtcgctgcctgcaaaaaccgccgccctggcaaagactggtcacggttgccgactatgcgccgccgttaagtctgctcatccaccagcttaagttttcccggcgcagcgaaatcgccagcgccctgtcacgtctgttactattggaagtcttacacgctcgtcgcaccaccgggttgcaattgccggatcgtatcatcagcgttccgttatggcagcggcgtcactggcgtcggggatttaatcagagcgatttgctgtgtcagccgttatcacgctggttgcactgccaatgggatagcgaagccatcacacgtacacgggccactgcgacccagcattttcttagcgcccggctacgcaggcgcaacctgaaaaatgcctttcgccttgaattgcctgtgcaaggtcgccatatggtgattgtggatgatgtcgttaccaccggaagtaccgtcgcagagattgcgcagttgcttttacgcaatggtgcggcgactgtccaggtctggtgcctttgtcgaaccttgtagagcctcgatgatgggcgtattataaccaactaaaatagtcaactattaggccattactatgatccgtatttccgatgctgcacaagcgcactttgccaaactgctggcaaatcaggaagaagggacacaaatccgcgtatttgtgattaaccctggcacgcctaacgctgaatgtggtgtttcttattgtccgccggatgccgtggaagccaccgacaccgccctgaaatttgacctgctgaccgcgtatgttgatgagttaagcgcaccatacctggaagatgcagagatcgattttgttaccgaccagttgggttctcagctaacactgaaagcgcctaacgccaaaatgcgtaaagtggcagacgatgcaccactgatggagcgcgtggagtatatgctgcagtcgcagatcaacccacagcttgctggtcacggtggccgcgtttcactgatggaaatcaccgaagacggttacgccattctgcaatttggcggcggctgtaacggttgttccatggtcgatgtgacgctgaaagaagggatcgagaagcagctactaaacgaattcccggagctgaaaggtgtgcgcgatctcaccgaacaccagcgcggcgaacactcctactactaagttatcccctcttttgtagattgcccgatgcgacgctaaagcgtcatttcgggcctacgttgaacatgtgccagacgttggcgcagcattgctttggcaaatccctcccttcgtttccccgcgataatatgaccaacctctcataatttaaatttaccccgctctggtgattctcaaacgccagatgttacccgtatcattcacgtgggtaccaaacatactcctgacatctgactacaataattagttttagtgggtatcagtcgtggtgccgcaatatctctgttcccgattgggataattagagcttgtcgtcagaaaattgacgttacccataacaaatgaaaggccaggtaaatcatgccattagtcattgttgctatcggtgtaatcttgttattactcctgatgatccgcttcaaaatgaacggcttcatcgctctcgtcctcgtggcgcttgctgttggattaatgcaagggatgccgctggataaagttattggctccatcaaagccggtgtcggcgggacgctcggtagccttgccctgatcatgggttttggcgcaatgctgggcaaaatgctggcagactgcggtggcgcacaacgtatcgccaccacgctgattgccaaatttggtaaaaaacacatccagtgggcggtggtactgaccggttttaccgttggttttgccctgttctatgaagtgggctttgtgctgatgctgccgctggtgtttaccatcgcggcttctgcgaatattccactgctgtatgttggtgtaccaatggcagctgcactgtctgtgacccacggcttcctgccaccgcatccgggtccgactgcgattgccaccattttcaatgccgatatgggtaaaaccctgctgtacggtactattctggcaatcccgaccgtgattctcgccggtccggtttacgctcgcgtgttgaaaggtatcgataagccaattccggaaggtntctacagcgcgaaaaccttcagcgaagaagagatgccgagctttggcgtcagcgtctggacctctctggtgccggtagtactgatggcgatgcgtgcgattgccgaaatgatcctgccgaaaggtcacgctttcctgccggtagcggagttcctcggtgacccggtaatggctacgctgattgccgtgctgattgcgatgttcacctttggtctgaaccgtggtcgttcaatggatcagattaacgacacgctggtttcttccatcaaaatcattgcgatgatgctgttgatcatcggtggtggcggtgcgttcaagcaggtgctggtagacagcggcgtggacaaatacattgcttccatgatgcacgaaaccaacatttctccgctgctgatggcctggtcgattgctgccgtactgcgtatcgcgctgggttccgcaaccgttgcggcaatcactgcgggtggtatcgcggcaccgctgattgcaacgacgggtgttagcccggagctgatggttattgcggtgggttccggtagtgtgattttctctcatgtgaacgatccgggcttctggctgttcaaagagtactttaacctgactatcggcgagaccatcaaatcctggtcgatgctggaaaccattatctcggtgtgcggtctggtaggctgtctgctgctgaatatggtgatttgataacactgactgccggatgcatcgcatccggcatcaaccgcactctacttcttcttcgctgcagctctgcgccgtctgtccaaatccttcagcaacttgttcacgccatcatcggcaaacatcgtctcaagcgttgcggaaagcttgcgtcgccagtttttatactggtaactggtgccaggaanattcaccggttcggccatatccagccagtcttccggctgtagtcctaacagagcactgttactgtcggcaatgtagcgctgcaaaccacgattaagcgtcggcgtcatcgacatcaacgatgccttatgcccggcacgttttggcagacaaccatatttatgcagtgcatccagcagcccttgcttcgccagttcgcgatcctgatacagaccgcgcagtaccacttcatccggatacagccccagggttttgcccagcgttagatccccgctctcccagtagccgcgtagcgtaggcaggtcatgtgtcgccgcaaccgccatcgactgctccggatacgctttcggtgcacggaacgtcttctcgtggtcgttttcgaaatagagcactttgtaggagtacacaccgctgctgcgcagcttaccgacaatctctaccggtacggtaccgagatcttcaccaatcaccatacagcgatgacgtttactttcgagtgccagaatcgagagcagatcatccaccggatagtgaacatacgcgccctgatctgccgtctcgccatacggtatccaccacaaacgcagcatcgacatcacatggtcaattcgtaatgcgccgcagttttgcatattggcacgcaacagctcgataaacggttcataagcacgcgcggtgatgatatgcgggtccattggcggcaatccccagttctgccccaacgggccgaggatatccggcggcgcgccaaccgacgctttcaggcaatacagttcacggtcgcaccaggtttccgccccaccttccgctacgccaaccgccagatcacgatacaagccaatcggcatttcatagccctggcttatctcccagcaggcggcaaactggctgtaagcctgccactgcaaccagagataaaaatcaacgtcatcgcgatgttcttcgcagaactgacgcacttctggtgaatccacgttctgatacatctctggccatgcaggccagccccagcgcatttcgtcctctttcacttgctgggcatgtagcgcatcaaaggctgcctgccagaacaggctgtcgccttgatctgcaacaaactggcgaaacgcggccatctgctcatcatcacgttgcgcgaaacctttccacgccattcgtaatgctgtcatttttagggcggtaaccgtggagtaatcgacccagtcggcatcccgcgcctgttgcagcgtctgttgcgtggtcggcaactgccaccaggcctgagcctcttcgctaagatggaaatcttcgacggcgttaacgtcgatataaatcacattcagccagcggcgagaagacgggctatacgggctggcgctctccggatttgccggatagagcgcatgaatcgggttcagaccaatgaacgatccgccacgttttgccacatccactagcatcgctttgagatcgccaaaatccccaataccccagtttttttccgatcgcagcgtataaagctggacgcaggcaccccacagcttttgtttattcagcaacgcctgcggttcgtaacagcgtttcggggcgacaatcaccctgcaatgcgcgcgctggtcttcctgggtaagcgtcagcgtgtgataaccttccggcagcttcgtcggtagattgaacgctttgccccccgttatatggcctttgtactgcgttccttcttcggtggtcagcagccagctatattcgccgctgccctccaccaccatcggcatttttttgccgctggtataaaccatgacattcgggactggcgttaccgccactttcgtggcggtacgttgatgcatcgcgtcaagcanacgccgtttggtttcggcgctaatcgactgcggtttaccgtgggcattgatgtaattagggctaatccccgccgccagcgcggcattatccagacgtttgctttccatcgagcttccttagcgttttgcctgccagatacgagcctgataatcgcgaatagagcgatccgagctaaacataccgcagcgggcggtattgaggatcgccgcgcgagtccaggcctcctggtcgcggtacagcacatccacctgcttttgtgcctctacataggctgcgaaatccgccatcaccagatacggatcgccgccctgtttgccgatactgtgcagcatctggtcgaaggcatgcttatcgccgtcgctgtatttaccgctttccagctctttcaatactgcgtccagcaccttatctttcttccgccatttcaccgggtcgtagcctttggccagaattgccttcacttgttccacggtatgaccaaaaataaagatattttcttcaccgactttctcggcgatttcaacgttcgccccatccagcgtaccgacagtaagcgcaccattgagcgccagtttcatattgccggtaccggaagcttctttacctgcagtcgaaatttgttcggagatatccgccgccgggatcagtttttccgccgccgaaacgcaataatccggcaggaacaccaccttcaacttatcgccaaccagcggatcgttgttgatcacgtcagccactttgttgatcgcaaagataatatttttcgccaggtagtagcccggtgccgctttcgcgccgaagaggaagacgcgcggtacgcgatcagcctgcgggttttcacgaatttctttgtacaacgccagaatatgcagcagattcaggtgctggcgtttgtactcatgcagacgtttgatctgaatatcgaaaatcgcctgtggattgatctcaataccggtacgaactttcacaaactccgccagacggactttattcgcctgcttgatctcgcgatattgctgacggaatttcgcatcatcagcgaatttttccagattgatcagctgatcgagatcgttagcccactcttttttcagtgatttatccaacagagccgccagtgccgggttgcactgtttgatccagcgacgtggggtaataccgttggtgacgttatggaatttgttcggccatagctggtgatattccgggaacagatctttcaccaccagatccgagtgcagcgccgcaacaccgttcaccgcgaaaccgccaaccacacacaggttcgccatatgcacttgtttgtcgtgcaccaccgccagtttagcccacactttttcatcgcccggccaggttttctccaccagcgttttaaagcgagtattaatttcgttaataatctgcatgtggcgcggcagtaagcctttcaccagtttcacatcccagcgttccagcgcttctggcatcagggtatggttggtgtaagcgaaagttttgctggtaatggcccaggcgtcatcccagctcatctggtgctcatcgatcagcacgcgcaacagttctggaatcgcgatagttgggtgggtatcgttcagctgaataacttcgtaatccgccagttcgtgcagtttacgccccgccagatgatggcgacgcaaaatatccgctaccgaacaggcacactggaagtactgctgcatcaagcgcagctttttaccggcagtatggttgtcgtttggatagagaactttggtcagtttttccgcattgatgccctgctgttcggcacgcaggaaatcaccgtcgttaaatttagtcagatcaaacggatgcgcgtgcgtcgcctgccacagacgcagcggctgcgccacgccattacgatagccgacaacggggagatcccacgcttgaccggtaatggtaaactccggctcccagcgtccgtctttcgtcactttaccgccaatccctacctgcacatccagtgcttcgttgtggcggaaccacgggtagttactgcgatgccagtcatccggcgcttcaacctgtttgccatccacaaaagactggcggaacaaaccatattgatagttcagaccgtaacccgtcgcagactgaccgacagttgccattgaatcgaggaagcacgccgccagacgtcccagaccaccgttacccagcgcagggtcgatctcttcttccagcaggtcagtcagattgatgtcataagccttcaacgaatcctgtacatcctgataccagccgagattcaacaggttgttgcccgtcagacgaccaatcaaaaactccattgagatgtagttaacatgtcgctgattcgccaccggcttggcgaatggctgagcacgcagcatttcggccagtgcttcactcactgccagccaccactggcgaggagtcatttcagccgcagaatttaagccataacgctgccactgacgtgaaagcgcttcctgaaattgcttatcgttaaaaataggttgtgacataggagttccacttttcttagattttcaacacaacgttatcgctagtttgccaggctcgatgttgaccttcctcatcctgcgggggattaggcagggaggagttgcggggatgagcaaggaaatgtgatctcgaccacttaaagctagtgcaaaccacaggattagcagcaaatcaatgccatacagcgcagaaaatctgtatctaagtgcaaaaaatggccgttgcgtattttcaaaaagcgaaaggtaactctataaattaagtaaaggagtgaaacagtttcacaagtaaaatatccagtgtgctccatctcattcttaatagatttattaagatcatctttttagatagcactttcatcaggaatgaagaagaaacccttgcttaaatgaatctgatgaacataagggaaaccagtattcacgctggatcagcgtcgttttaggtgagttgttaataaagatttggaattgtgacacagtgcaaattcagacacataaaaaaacgtcatcgcttgcattagaaaggtttctggccgaccttataaccattaattacgaagcgcaaaaaaaataatatttcctcattttccacagtgaagtgattaactatgctgattccgtcaaaattaagtcgtccggttcgactcgaccataccgtggttcgtgagcgcctgctggctaaactttccggcgcgaacaacttccggctggcgctgatcacaagtcctgcgggctacggtaagaccacgctcatttcccagtgggcggcaggcaaaaacgatatcggctggtactcgctggacgaaggtgataaccagcaagagcgtttcgccagctatctcattgccgccgtgcaacaggcaaccaacggtcactgtgcgatatgtgagacgatggcgcaaaaacggcaatatgccagcctgacgtcactcttcgcccagcttttcattgagctggcggaatggcatagcccactttatctggtcatcgatgactatcatctgatcactaatccagtgatccacgagtcaatgcgcttctttattcgccatcaaccagaaaatctcaccctggtggtgttgtcacgtaaccttccgcaactgggcattgccaatctgcgtgttcgtgatcaactgctggaaattggcagtcagcaactggcatttacccatcaggaagcgaagcagttttttgattgccgtctgtcatcgccgattgaagccgcagaaagcagtcggatttgcgatgacgtttccggttgggcgacggcactacagctaatcgccctctccgcccggcagaatacccactcagcccataagtcggcacgccgcctggcgggaatcaatgccagccatctttcggattatctggtcgatgaggttttggataacgtcgatctcgcaacgcgccattttctgttgaaaagcgccattttgcgctcaatgaacgatgcactcatcacccgtgtgaccggcgaagaaaacgggcaaatgcgcctcgaagagattgagcgtcaggggctgtttttacagcggatggatgataccggcgagtggttctgctatcacccgctgtttggtaacttcctgcgccagcgctgccagtgggaactggcggcggagctgccggaaatccaccgtgccgccgcagaaagctggatggcccagggattccccagcgaagcgattcatcatgcgctggcggcaggcgatgcgctgatgctgcgcgatattctgcttaatcacgcctggagtttgttcaaccatagcgaactgtcgctgctggaagagtcgcttaaggccctgccgtgggacagtttgctggaaaatccgcagttggtgttattgcaggcgtggctgatgcaaagccaacatcgctacggcgaagttaacaccntgctggcccgtgctgaacatgaaatcaaggacatcagagaaggcaccatgcacgcagaatttaacgctctgcgcgcccaggtggcgattaacgatggtaatccggatgaagcggaacggntggcaaaactggcactggaagagctaccgccgggctggttctatagccgcattgtggcaacctcggtgctgggtgaagtgctgcactgcaaaggcgaattgacccgctcactggcgctaatgcagcaaaccgaacagatggcacgccagcacgacgtctggcactacgccttatggagtttaattcagcaaagtgaaattctgtttgcccaagggttcctgcaaaccgcgtgggaaacgcaggaaaaagcgttccagctgatcaacgagcagcatctggaacagttgccgatgcatgagtttctggtgcgcatccgagcacaactgttatgggcctgggcacggctggatgaagccgaagcgtcggcgcgtagcgggattgaagtcttatcgtcttatcagccacagcaacagcttcagtgcctggcaatgttgattcaatgctcgctggcccgtggtgatttagataacgcccgtagccagctgaaccgtctggaaaacctgctggggaatggcaaatatcacagcgactggatctctaacgccaacaaagtccgggtgatttactggcaaatgaccggcgataaagccgccgctgccaactggttgcgtcatacggctaaaccggagtttgcgaacaaccacttcctgcaaggtcaatggcgcaacattgcccgcgcacaaatcttgctgggcgagtttgaacctgcggaaattgtcctcgaagaactcaatgaaaatgcccgcagtctgcggttgatgagcgatctcaaccgtaacctgttgctgctaaatcaactgtactggcaggccggacgtaaaagtgacgcccagcgcgtgttgctggacgcattaaaactggcgaatcgcaccggatttatcagtcattttgtcatcgaaggcgaagcgatggcgcaacaactgcgccagctgattcaactcaatacgctgccggaactggaacagcatcgcgcacagcgtattctacgagaaatcaatcaacatcatcggcataaattcgcccatttcgatgagaatttcgttgaacgtctgctaaatcatccggaagtgccagaactgatccgcaccagcccgttgacccaacgtgaatggcaggtcctggggctgatttactccggttacagcaacgaacaaatagcgggtgaactggaagtggcggcaaccaccatcaagacgcatatccgcaatctgtaccaaaaactcggcgtcgcccaccgtcaggctgccgtgcagcacgcgcagaaactgctgaagatgatgggttatggggtgtgagtttgtatagcgtttttatgtacactctttatactgtatataaaatcgcactacaggctcatgaatatgaaaccggaaagcaaagaagcgccaatcaatatcagagcgaaagcctcacagcgtgacctgattgatatggcagcgaatctggtcgcaaaatcgcgcactgattttatgctggatgccgcatgccgtgaagcgcaagacatcttattagatcaacgactattcatccttgatgacgagcaatacgatgcgtttctcgctgccctggacgcccccatcactgctgagcgtcaggccaaaattaacgcgttgatgaatcgtaaatcgccatgggaataacggctcctactcccctaacgtctgaacataatctggctgacttttgctgttccgatcacgggatgaatgaatggctaaaaaagaaagcgttaaaaaatcacagctccggtctgtctcgtgtttacgttatctgtattgccaatacccgccaggtaatcggctattactgcctttctacaggcagtattcaacgtaatttggcccctggagccatgcgacgtaatgctcccgaatcgttgcctgttgtcgtattaggcagactggcaattgatcaagcctgggcaggtaaagggttgggcgtcgcattgttgaaagatgcagtctatcgcacaatgtccatagctcaacaggtaggggttcgtgcgctcattgttcatgccttagacgattcagtacgcaatttctatctgaagtatgcctttgtaccttcaccattccagtcacttaccttactgtatcccattactctggagtaatttacctctaccggatagtcacactgatgagtctgatccggganggatttcaatcagtgagtttggttatcatcacccgcgttacgccatctgtttcagccagagtaaaccgcaccggcaagaaacgctccaccacggcgatattggtcagcagatggcatgagggatgggcgaccgtaaattgtcccgcgcccgccagcgccattggcaacactagctggtcagcaagatattcccccactgccgccgggcttgccaggtagcgtttcacctctttcaccaactgtgccgcaaccacctcggcactgacgcgcttttcaccgacgacaaaaaagcgttcggtgatattttcactttcgacttcaagcgagacggtattacccggcccctggtcgcgcggcaggttatgaatattctgctcatgcagggaaaaacttgccgccagcgtagcgatttcacgctcagcgacatgccgcggcacgccagctaataacacctctccacgcatctgcacaatgttcccgcgctcgccaagttgcaaggtgttaaacgatgccaccggcgagacttccgttgccaccacgccgcctccggcaggataaaaaccgtgacgtaacagcgtggtttgctgatgaattcctattttcgccagcagcggctccaacacccggcggataaaatccgcaggcggggccgacgggttatcggtaccgccgctcacttcaacacgcgaaggtccatcggcaaaccacagcgcgggcagcaccgtttgcagcaccagcgtacaacttcctgcgctaccgatagcaaagcggtaatcgccgccacgcacggtgccgggccggaagaccagacgctgcgaccccagctccgcgccttccaccgtcgccccgcaaatttccgtcgccgcctttaccgccgtcagatgctggcgcaacagtcccggttttgcccgcccggcacgaatgccggtgatggtaaatggctggccggttatcatcgacagactcagcgccgagcgcatgatctgcccgccgccttcgccctgtgcgccatccagcgcaatcatccttttcatcatttatccttttacgcacaccacctgacgtagggtgtagataacttccaccagatcgctttgtgccgccatcaccgcatcaatatctttatacgccatcgggatttcgtcgatcacttcggcatctttacggcattccacatgcgcggtggcacgaatttgatcttccacgctgaacatttttttcgctttagtacggctcataacccgcccggcaccgtggctgcacgaacagaacgactcttcatttcccagcccacggacgataaagcttttcgctcccatcgaccctggaataattccatattgaccagcacgcgcagacaccgcgcctttacgcgtcacgtagatctcttcaccaaagtgctgttctttttgcacatagttgttgtgacagttgatctcttccatcgccagcgtttgtggctgtctgaccgttttctgcgtaatgctctgcaacgccgttactacgttttccatcatcacatcgcggttaaggctggcaaaaagctgcgcccaggccacggctttcaggtaatcatcaaagtattccgtaccttccataaagtacgccagatcacgcgacggcaatgtttcaagcgtttcctgcatctctttttgcgccagatcgataaagtaagtcccgatggcattaccaattccgcgtgaaccggagtgcagcataatccacacctggtccgactcatcaaggcagatttcaataaagtggttacccgttcccagcgttcccaggtgtttatagttgttagtgttaaggaaacgcggatatttttgcgttaaccactgataaccggcctccagctcagcccatttcgcatcgacgttaacaggcgggttttcccatgcgcctttatcacgtttacaacggccagtggtacgcccgtgcggcaccgcagtttcaatcgcctgacgcagctccgccaggttttccggcaggtcagccgccgttaaagcggtacgtagtgcgttcattccacagccaatatccacgcccaccgccgccggaataatcgcccctttggtcgggatcacgctaccaatggtggaacctttacccaggtgtacatcaggcattaccgcaatatgtttgaaaataaacggcatcttcgccgtattaataagttgctgacgcgcatcggcttctaccggcacgcctttggtccacatttttaccggggcattttcagtggtcagtaattcgtaattcattttgtttttctcttttcgttgtttgcggtcctgataattgcaaccgtcgtgccagaaaattaaataagcagattaattttttaattcattgttttaaaaagattatatctttacgtccgtaaacggagatttcccgcaaagccaatttaccgataatgaaatatcgtcttttataaggatatctaagatgcgtaaaacagtggcttttggctttgtcngaacagtgctggattatgccgggcgcggcagtcagcgctggtcgaaatggcgtccgtcactctgtatatgccagcaagaatcgttagtcatcgatcgactggaattattgcatgacgcccgctcgcgctcgctatttgaaacgcttaaacgcgatatcgccagcgtttcgccagaaaccgaagtggtgagcgttgagattgaactgcataacccgtgggatttcgaagaggtttacgcctgcctgcatgatttcgcccgtggttacgagtttcagccagaaaaagaagactatttaattcacatcaccaccggcacccacgtcgcgcagatttgctggtttctgctggctgaagcgcgttacctgcccgcccggttgatacaatcttcacctccgcncaaaaaagaacagccgcgcggcgcaggtgaagtgacgattatcgatctcgatttaagcctttataacgccatcgccagccgctttgccgaggaacgccagcaaacgcttgattttcttaagtccggtattgccacgcgtaacccccacttcaaccgcatgattgagcagattgaaaaagtggcgattaaatcccgcgcaccgatcctgctaaacggcccaaccggtgcgggcaagtcatttctggcgcgacgtatatttgaattaaaacaggcgcggcatcagtttagcggcgcgtttgtggaagtgaactgcgcaaccctgcgcggcgataccgccatgtcgacgctgtttggtcatgtgaaaggcgcgtttaccggggcacgggaatctcgtgaaggattattacgcagcgccaacggcggaatgttgtttcttgatgagattggcgaactgggcgcagacgaacaggcaatgctgctgaaagccattgaagaaaaaaccttttatccgtttggcagcgatcgccaggtgagcagtgattttcagcttatcgccggaacggtgcgtgatttgcgccagctggttgccgatggcaaattccgcgaagatctatacgcgcggatcaatntctggaccttcaccctgccggggctacgccagcgtcaggaagatattgaacctaacctggattatgaagtggagcgccacgcttcactcaccggcgacagcgtgcgttttaacaccgaagcgcggcgcgcctggctggcctttgcgacatctccccaggcaacatggcgcggtaactttcgcgagctttctgccagcgtcacgcgaatggcaacctttgcctctagcggacgcattactctggacgtggttgaagatgagataaaccgtctgcgctataactggcaggagagccgcccctccgcgcttacggcgttgctgggcgcagaggcagaaaacatcgatctcttcgaccgtatgcaactggaacacgttatcgcaatctgccgccaggcaaagtcgctttccgcagccggacgccagctttttgacgtttcgcgccagggcaaagccagcgtcaatgacgcggatcggctacgcaaatacctggcgcgttttggtctgacgtgggaagccgtgcaggatcagcacagctccagttgaatatggtggtccgtcagcacctgcatcacgcttactggcggcggggtgtcggtgtagacggcatctaccatgctgatgctacccatattgaccatcgcgttacggccaaatttcgagtgatcgacaaccagcataacgtggcgcgagttctcaataatggcgcgtttggtgcgaacttcgtggtaatcgaactccagcagcgagccgtcgctatcgatgccgcttatccccagaatgccgaaatcaaggcggaactgggagataaaatcgagcgtcgcttcgccaatgatcccgccatcgcggctgcgtaattcgccaccggcgagaataatacggaaatcctcttttaccatcagcgtgttagcaacgttaagattgttggtgacaatgcgcaaattgctgtgattgagcagcgcgtgcgccaccgcttccggcgtggtgccgatatcgataaacagcgtcgagccattggggatttgctccgccactttgcgggcgatgcgctctttttcttcggtctgggtggctttacgatcgtgccacggcgtgttaaccgaactggaaggcagcgccgcaccgccatgatggcgcaggatcaggttttgctccgccagctcattgaggtcgcggcgaatagtctgcgggctgacggagaagtgctccaccagctcctcggtactgacataaccctgctgtttaaccagttcgataataccgttgtgacgttgtgtttgtttcatttctaaatccctggaattattttcgttttcgcgcattgagcgaatcaacaaaagccatcgctaaacccacggctaacccggcgatgtgtgctccgttcgccatcgacatcccaaacaaatcaaaccatccggcgacaatccagatcagcgcaaagataattaacccacgttgcaggtaaatgccactttgcggatcgcgttcgccacgtagccagacgtagcccatcagcgcatacaccacgccagaaagcccgccaaaccacggcccgctgaatttttgctgcacatagccgcttaacagggcgctgataagcgtaatgacaattagcttaccgctaccgaggcgtttttccaccgcaccgccgagataccaccaccagagcaggttaaagaggatatgcatcagcgagaagtgcattaacgcgtgggtgaagtaacgccagaactcaaatttcagtgctggatcgaatggccaagccagccataacatcacttcctgatcgccgagaatttgcatggcaataaacaccaccacgcaggcgatcatcatcacccaggtcaccggacctgcgcgttcacgcaaggcggcaaagaaaggataacggcgataatgcaggccactgccggtatggcctgcctgccagctcgccgccagataacgcggatctgccgggttttcgagaaaacgcgccagctccgcccgtacgcgctcggcctgggactcatccgccagccagacatcgctttggttatgttgttgaatcgtgaggataacaccctgcgtcgccatgtaatcaacaaacgcctgcgccacgcgggggttagcaaaagaggtaatcatcaacatcgttgctgtcgcttattccacacaaaaggggacagtataaagcgttacgcgccgtacgccacctntgcgggaaactgacgttgccaggcttcaaagccgccgtcaatgctatagaccacatcgtagccctgttgcagcagatactgcgccgcgcctttgctgctattgccgtgataacacatcaccatcaccggagtgtcaaagtcgttattacgcataaaagcgcccagcgtgtcgttggttaaatggaaagcctgcaccgcatgtcccattgcgaaactctgtggatcgcgaatatcgaccagcaccgcctntttttcctgcaanttntggtgcgcgtcggcaacgttaatacattcgaactgatccatgcgtctctctttctttacaaacaagtgggcaaatttaccgcacagtttacgtcgaagcggcagataaacgccataatgttatacatatcactctaaaatgttttttcaatgttacctaaagcgcgattctttgctaatatgttcgataacgaacatttatgaactttaacgaaagtgaatgagggcagcatggaaaccaaagatctgattgtgataggtggcggcatcaatggtgctggtatcgcggcagacgccgctggacgcggtttatccgtgctgatgctggaggcgcaggatctcgcttgcgcgacctcttccgccagttcaaaactcattcacggtggcctgcgctaccttgagcactatgaattccgcctggtcagcgaggcgctggctgaacgtgaagtgctgctgaaaatggccccgcatatcgccttcccgatgcgttttcgcctgccacatcgtccgcatctgcgcccggcgtggatgattcgcattggtctgtttatgtacgatcatctgggtaaacgcaccagcctgccgggatcaactggtttgcgttttggcgcaaattcagtgttaaaaccggaaattaagcgtggattcgaatattccgactgttgggtagacgatgcccgtctggtgctcgccaacgcccagatggtggtgcgtaaaggcggcgaagtgcttactcgtactcgtgctacttctgctcgtcgcgaaaacggcctgtggattgtggaagcggaagatatcgataccggcaaaaaatatagctggcaagcgcgcggcctggttaacgccaccggcccgtgggtgaaacagttcttcgacgacgggatgcatctgccttcgccttatggcattcgcctgatcaaaggcagccatattgtggtgccgcgcgtgcatacccaaaagcaggcctacattctgcaaaacgaagataaacgtattgtgttcgtgatcccgtggatggacgagttttccatcatcggcaccaccgatgtggaatacaaaggcgatccgaaagcagtgaagattgaagagagtgaaatcaattacctgctgaaagtgtataacgcgcactttaaaaaacagcttagccgtgacgatatcgtctggacctactccggtgtgcgtccgctgtgtgatgatgagtccgactcgccgcaggctattacccgtgattacacccttgatattcatgatgaaaatggcaaagcaccgctgctgtcggtattcggcggtaagctgaccacctaccgaaaactggcggaacatgcgctggaaaaactaacgccgtattatcagggtattggcccggcatggacgaaaganancgtgctaccgggtggcgccatcgagggcgaccgcgacgattatgccgctcgcttacgccgccgttatccgttcctgaccgaatcgctggcacgtcattacgcgcgtacttatggcagcaacagcgagctgctgctcggcaatgcgggagcggtaagcgatcttggggaagatttcggtcatgagttctacgaaacggagctgaaatatctggtcgaccacgagtgggtccgccgcgccgacgatgccctgtggcgtcgcacaaaacaaggcatgtggctgaatgcggatcaacaatctcgtgtgagtcagtggctggtggaatatacgcagcagaagttgtcgctggcgtcgtaaattaacgtaaggtgatcaggtcagatttcaatctggcctgagactgatgacaaacacaaaattgcctgatgcgctacgcttatcaggcctacgtggtttatgcaatatgttgaatttgcatgattttgtaggcctgataaggcgttcacgccgcatcaggcatgaacaaagcgccacgttgtcaacaatctgacctactttttgattcagggaattaccgcaaagcccacgccatcatacccaacgtaacaaaacttaagcacgttccccactcactccacttccgtatctggcttctatttttgctacgccactggcaataatatcccaacgcaaaaccaagctgtgcacttatcggaccgacaaagtcgatccactgttgagaccaaaatggcgaaacattcagtgggagccagacaactgtcagaaagaaactgcgcatattttccagcaaagcaatttgcgctggcgcgacataaaaaatgatattccacaggagcaaccagaaataaactggtgcaaataccagccaacaatgcagtctgcttttcaattcaggtggcgttctgcgcgcaaattgccaaccaacgcccaccattgcacagaagaaaagcgcatattcagccgataaccatagttgtaattgcagaagggaaatacgcctgtgcatgagcgggattgagaacagtatttctcccagaaaactcagcgtgattacacaggcagccagcgcaaccaccgtcggccacaccaacaacggtacaataacaaagccgagaaataacggataaatataaagtctgattatattcatcattattgtcctgatgattcgggggatgcttcatacagcggcacataccccacatcctctaccaactgttgcccctgctgacttataaaccagtcaacaaatttctgcgtttccggcgtgggattttcacgcgtcaccatataggcatccacaatgtatggataagtgccgttgcggatattttcctcggtaggcgcaacgccatttatagccaaaagtttaatctgcttgcgcattttgagcatattgtcattcatacgagtgacgtaatagtggaaggtgtacccaatggaagatggcgtgttttgatagtcggcaacttcagtaattaaaccgcccataagatcaatcacagtggattttttagctggcagcattggggtgtcttgcataaccaaccccttcataatcgtttggcttccagaatcttcagggcgctgccagacttttatatgttcgtcactaccacctactttattccagcggctagtnnnnnngctaaaaanatctttaacctggtgctcagagagagaatttaccgggttattaatatcaacgataaagacaaaggcttcgcgggcgaaagcggtatatttcagtttaacacccgcttcttctgcacgttttttctgtccttccgacggttgtgcaacaaaaataaccgtcgcggaacctttaatcagactatcgtaggcttcagctgttcgggtttgctgcaaaccatacgcctgccaggccagcgaggttcgatccttatcttttggctcgggtactaatttataatacgcggaggcatacagcgggtataaggctgtagcgccgtacactctcggccatcttgaccaatcatcgctgtaacgtaatgcaggttgcccccgcagagacgtcagtccatggctctcttcttccctgacgctgttatagtacccttcccggtcgacacatcccgccagtaacgccgtgcctaatagtaaaacaccggtgaatttattcatctcgctgattcctttctctcgagcgttattccattgttagatacagcggcacatatcccacatcttctaccagactctgcccctgcggcgttaaaaaccattcgaccagtttttgtgtttctgacgttgtattttctctcgtcaccataaatgcatcgacgatgtacgcatatttgccgttgcgaatgttttccgccgtcggtgtaataccgttaatcgctagcaatcttatatttttatcagcattcatttgcgtcgcgtaatagcggaaggtatagcctattgcgttgtttgtattacggtattcggcaacgactttaatcattccctccatcacgcttgccacttccgtttcctgcggcgagatcatgcggacttttttcatgacctgtgattgcatcactgtctggctgccagagtcttccgggcgctgccaggtctggatctcctgatcgttaccgccaacagtacgccaattggtaattgcaccactgaaaatgtcacgcacctgttgttcagtcagggaattaaccggattatccgcattgacgatgaaaacaaatgcttcacgggcaaatggcgtgtatagcaaagtgacgcccgattcctcagcgcgttttttctgcccgccggagggttgcgccacaaaaataatatcggcatcacttttaacaatccggttatatgcatcgggggtacgagagttctccagatattcccaaacgtgaaaatcctctggtattacacttaatgcataaaatgcagaagcataaattgggtacgcagccgtggcgccatcgattcgcggccagttttgcctaaactgaatttgcggtttgccacgcagcggcgtcagtcgattattgagtttatcaggtcgccaggccctgatatcaatattttcgcgtacaccgacaccaggattttgctgcttatataaatgggcctgatacccggcgacaataccaagtaagagaagtagaaacaggagtaagttacggcaacgtagtccggacgtgccggataaaggatatctggtcggccaggcgtatcccagcgaaaaactgatatgcgccccaacgggaataatgaccatccaccagtactcaccacccactaatgagactaaaaaaacgcccaaccagggaagcataaggtttgccaaccaaccagctcccatctggcgaaattgataatctgccagatgtagcgtgattatccagccaaccagggttaatagcgcgggtaagagaaaaaagcattgccgccagacggctatttctctgttttctggcgcgctatcaccggcccacacgcgaccagagaaaaatattattatcgcccccagcgtcagcataaagacgttgagtagaagataaattgttggcgtgataaggatattacaaacttcaataataccggtaagcccgacacccagcatggcaacaaccgctgccaaaaattgcgccagtatggggatgccgaaaaaagtcattatcagcgaggtcaaaatccattttctatttggcatcattctgtccattcttcctgaatgacggaattatactccccgagaaccctcgccccctctggacacttttccgaaataaaggcgaaaaaaacgggaccttgtggccccgttctgttttttagcgaacttacaatctcaccggatcgatatgccagatatgatcagcgtactctttgatagtacggtcagaagagaagtagcccatattggcaatgttcagcatcgcttttgcggtccactcttcctgaagctcgtagagttcatcgactttatcctgacaatcgacatagctgcgataatccgccagtacctggtagtgatcgccgaagttgatcagcgaatcaaccagatcgcgatagcgacccggatcttccggactgaatacaccgctgccgatttgcgtcagcacctgatgcagctcctcatctttctcgtagtattcacgcggtttgtagccctgacgacgcagttcttccacttcttccgctgtgttaccaaaaataaagatattgtcagcaccgacatgatccagcatctcgacattcgcaccgtccaacgtaccgatagtcagcgcaccgttaagcgcaaacttcatgttactagtgccggaagcttccgtccctgccagcgaaatctgttcagacagatctgccnccggaatgatcaactgcgccaggctaacgctgtagttcgggatgaacacgactttcagcttatcgccaatctgcggatcgttgttgatcactttcgctacgtcattgatcaaatggataatatgcttcgccatgtaataggccgaagccgccttaccgccaaaaatnttcacgcgcggtacccacttcgcatccgggtcggccttgatgcggttatagcgggtaatcacatgcaacacattcatcaattgacgtttgtattcgtgaatacgtttgatttgcacatcgaacaacgcctttggattcaccaccacattcagctgctgggcgatatactccgccagacgctttttattctccagcttcgcctgatgcacagcgtgattaaccattgggaaatcacagtgttgttgcagctcattaagcaggctaaggtcggtgcgccagttacggcccaggtgttcgtccagcacggctgaaagcgatgggttcgctaccgccagccagcgacgcggcgtcacaccgttggtgacgttggtgaaacgacccgggaagattttcgcaaagtcggcaaacaacgattgcaccatcagattagagtgcagttccgatacaccgttaactttgtggctcacaacaaccgccagccaggccatacgcacacgacgaccgttggattcatcaatgatcgacgcccgtcccagcagatcggtatcgttcggatactgttcctgcaaggttttcaggaaatagtcgttgatttcaaagatgatctgcaggtgacgcggcagaattttacccagcatatcaaccggccaggtttccagcgcctcgctcatcagcgtgtggttagtgtaggagaagacctgacaacacacctcaaacgcgtcgtcccagctaaattggtgctcatcgatcagcagacgcatcatctcaggaatcgacagtaccggatgggtatcattgagatgaatcgcgattttatccgccaggttatcgtaggttttatgcaactgataatggcggcttaaaatgtcctgaatggtcgaggaaaccaggaagtattcctgacgcaggcgcagctcacgcccggagtaggtggagtcatccggatacagtacgcgagatacgttctcggagtggtttttatcttccactgccgcgaagtagtcaccctggttgaatttaccgaggttaatttcgctactggcttgcgcactccacaaacgcagcgtgttggtcgcgtcggtgtcgtaaccagggattatctgatcgtaagcgactcccagaatctcttcggtttcaatccagcgcgtttttttaccttcctgctgaatgcgaccaccaaaacggactttatagcgcgtgttgtggcgtttgaattcccacgggttaccatattccagccagtagtcaggcgactctttctggctaccgttaacgatgttctgcttgaacataccgtagtcatagcggatgccgtaaccgcgccccggcaaccctaacgtcgccagagaatcgaggaagcaagccgccagacgtcccaggccaccgttaccgaggcccgggtcattttcttcatcaatcagctcttcgagatttaaccccatcgcttccagtgcgccctgtacatcttcgtaaattcctagcgacaacatggcgttggagagcgtacggccaatcaaaaactccatcgacaggtagtaaacctgacgagtttcttgcgacaactgggcacggtttgaacgtaaccagcgctccacgagacgatcgcgcacagcaaataacgttgcgttcagccattcatgtttattggcgacgaccgggtcctttccaatcgtaaacatcagcttgtaagcgatagagtgcttaagagcttctacgctaagcgtgggcgatgaatatgtaaacggagcattcatataggcgtttcctgaaaactatttcaagcgatagtaaagctcacggtacgacttcgccgcgacctgccagctaaaatccattgccatagcctgacgttgcacaaaccgccacagagaaggacgggaccacagtacaaaagcacgtcgaatagcccgtaacagcgaccaggcattactatcttcaaagacaaacccactggcgacgccatctgcaaggttctcaagagaacagtcagaaaccgtatcagcaagcccaccggtgcgccgcactaacggcagcgtaccgtacttcaatccataaagttgcgttaagccgcacggttcaaaacggctgggcaccagaatgacgtccgcaccgcccataatgcgatgcgaaaatgcttcgtgatagccaatctgaacgcccacctggccggggtattccgctgccgccgcaaggaaaccttcctgcagcaccggatcgcccgcgccgagtagcgccagctgcccgccctgctccagaagacccggtaaggcctccagcaccaggtcgaggcctttctggctggtcagacggctcaccactgcaaaaagcggcactttatcgtcaaccttaagccccattgcgatttgtaactggcgcttattttccgctttatcttccaacgtatcgcgggtgtaacgcgaggccaatagtaagtccgtctctggactccagattttctcgtccacgccgttcagtacgccggaaagacgcccttcacgatgacgctgttgcaacaaaccttccataccgtaggcaaactgcggttcggtgatctcgcgagcgtaggttggactgaccgccgtaatgtgatcggcatagtacagaccggccttcaggaaagagatttgtccgttgaattccagcccatgaatattaaagaatgaccatggcaattggatgtcattcatgtgatgtgcataaaacatgccttgataggccaggttgtgcacagtaaacaccgacttcgccggacgcccgcgcgccgccagatacgcaggcgcaaggcctgcatgccagtcgtgcgcatgcaccacatcaggacgccagaatgggtcaagcccgctggccatttctgccccaacccaccccagcagcgcaaaacgcaatacgttgtcggtataggcaaataagttggtatcgtgatacgggcttcccggacgatcatagagatgcggcgcgtcaatcaggtatatgccaaccccgttgtaatgaccgaacaacagcgtgatatgcccggcgaaggtatcacgacgggatactacctgcgcatcggtcacgccacggcgaatatcgggaaatgcaggcaacagtacgcgagcgtcaacgccgtctgcgatttgtgctgcgggtaatgccccaataacatcagccagaccgccggttttaagcagcgggaacatctctgaacatacatgtaaaacctgcattatcgctcctgtttatgccctaacttccgtagcatttcgcgcgttaccagcacgatgccttcttctgaacgatagaaacgacgtgcatcttcctctgcgttttcaccaatcaccatgccttccggaataacacaagcacgatcgatgacgcagcggcgcagacggcacgagcgacctacccatacttccggtaacaatacggcggaatcaatgttgcagaatgaattcacgcgaacgcgcgagaacagaacggactgcaccaccaccgaaccggagatcacacaaccgccggaaaccagtgagttaagggtcatcccgtggctaccggagcgatcctgcacgaatttcgctggcggtaatgattcattgtaggtgcgaattggccaattgcgatcgtacatatccagttccggcaccacagaggccagatcgaggttcgctttccagtaagcttccagcgtacccacatcgcgccagtacggctcggcatccggatcggattgtacgcaagagagcgggaacgggtgcgcataggccagaccggcttcggtgatcttgggaatcaaatctttgccaaagtcgtggctggagttctcatcgcgatcgtcttcttccagcagttcatacagatagtcggcgtcaaagacgtagatacccatactcgccagagatttgctcggatcgttcggcattgacggcgggttagcaggtttttcaacgaattcgataattttatcgttctcatcaaccgccataacgccaaatgcggaggcttcttcaatcggtactggcatacaagcaacggtgcaacgtgcgcctttttcgacgtgatcgataagcatacgcgagtagtcttgcttgtagatatggtcgcccgccaggatcaccacgtattccgctttataacggcgaataatatcgaggttttgggtgaccgcatctgcggtgccgcgataccagttttcccctttcattctctgctgtgctggcagcagatcgacaaactcgttcatttcttcattgaagaatgaccagccgcgctgaatgtgctgcaccagagtgtgggactggtactgggtgatcacgcccanacgacggatcccggagttgatgcagttagacagcgcaaagtcgataatgcggaacttaccgccgaagtgtacggccggttttgctcgcttattggttaaatccttcaggcgggtaccacgtcctcccgccagtatcagggcaacagatttcaatggcagctggcgcgccaacattaagtgatcgttcttctctaaactaaccatgactaactccttttttatcatctctggaacacacacaatccgtgtgcaggtccctgccagacagccgtaatcactgggttatcctctccagcgaatgggggaatggcgtgccactccccagcaggtaaaacaatctctgttacctcaagcgtggcgttaattgcgatcaaaaagcgatccgagagcagaatttgcagctgtttcggcccgttttgccactcatccgtgcttaaaggttgagcatatcgatttagccaacggacattgccgtcgccttcttcccaccagcgattctccaccaaagcgggaatacgcttgcgcagatggattaacgcggcggtaaatgcggttaaaccactgcttgcctgcgaccagtccaaccaggttaattggttatcctgacagtaggcattgttattgccatgctggctgtgaccatgttcgtcaccggccagtaacatcggcgtaccctgggagagcaacaacgttgttaacagggcgtgaatgctgtcgcgccgccgttcaaccaggtcaagggtaccgcctaccccttctttaccatgattgttactgtaattgttgttggtcccgtcgcgattttcttctccgtttgcttcattgtgtttatggttgaaacaaacgcagtcgcgaagcgtaaaaccgtcatgcgcggtgacgagattaatcgcggcactcggcagacgaccattacgtttaaaaacatcgctggaggcagcaaaacgcccggcaaacgcccccagaggcaaatcataatgtagccagaaacgacgggcagcatcgcggaaatgatcgttccactcggcaaacagcggcgggaaatttcccacctgataaccaccaggagcgatatcccacggttcagcaattaacttcacctgcgagagcaccgggcagttctggatagcggtaaacaacggcgcatcctgacggaactctggcgtacggcccatgactgccgccagatcaaagcggaaaccatcgangtggcaggtttctacccaataacgcaggcaggcgctggcataatccaccaccgccgggtgactcaaattgagcgtgttgccacaaccggtccagttgtgataatcgccgtcttctcttatccaataatagctacggttgtcgatcccacgcagcgagaataacgggccgtcgaggtccagttccgcactatggttgagcacgatatcaagaatgacttcgatacccgctttatgcagtgctttgattgcatcgcgaaactcatgcagngccgtttctggcgagcaggcntacgccggatgcagcgcaaacatcgccaccgggttgtaaccccagtagttacttagccccatgcgttgcagacgtggttcactggcaaactgcgccactggcagcagttccagcgcggtaatgcccaattgtttcaaatagttgatcatcaccggatgcccgagggctttataagtgccacggatctcgaccgggatctccgggtgcaggtacgttaatcctttaacatgggcttcataaatgatggtgctgccccacggcgtgcgcggcggggcatcatcttcccagtcatagtgatcaaccaccactacgcatttcggcgcaatggcggcgttgtcgcgatagtcaggttcattatgaccggcgtgcagcagcgggttatctttaaactccccgtcaatttgccgcgcgcaaggatcaatcaacaacttcgccgggttaaagcgatgcccctcggcgggttgccaggggccatgaacgcgataaccataacgcaaacccgggcgcgcatccggcagataaccgtgccaaatgtcgccactgtgccctggcaagtcatagcgatgttcctggccattggcgtcaaagacacacagttctacccgctcggcatgagcggagaaaagtgtgaagttgacgccctgaccgtcgtaatgcgcgccgaggggagcgggtttgccaatggcgagttgtgtcattctgcctcccgaaccagccagatagtggccagcggtggtagcgtcaggcttagtgaatgctgacgaccgtggctggcaatctcatcgctgtgtaccgtgccgccattacctgcattactgccgtgatagtgcatggaatcggtattgaggatctcacgccatttgcctggctgattaatgccgaagcgataatcatgacgcggcaccggcgtaaagttactggcaacgatgatttcgttaccctctttatcgcgacgcacaaagatcagcaccgagcgttctttgtcatccaccaccagccattcaaagccgtacgggtcaaaatccagttcatgcatcgctttatggtggcggtaggtgaggttcagatcgcgcaccagacgctggacaccgtggtgccagttatcgccgccttccaacagatgccagtcgaggctggcgtcatggttccactcgcggccctgggcaaattcgttccccatgaacagcagtttcttgcccggaaatgcccacatccagccatagtaagcgcgcaggttagcgaatttctgccatgcgtcgcccggcatgcggtcgagaatcgattttttaccgtggaccacttcatcatgcgacaacggcaggacgaagttttcagtgtagttgtagagcatcccgaaggtcagtttatcgtgatgatactgacgataaatcgggtcgagcttcatgtagtccagggtgtcatgcatccagccgaggttccacttgtaccagaagcccagaccgcccatatcctgcggacgagaaacgccagggaaatcggtagactcctcagccattgtcaccgcaccggaaacctgctcaccaagaatacggttggtattacgcaagaattcaatcgcttcaagattctcgcgcccgccaaattcgttcgggatccactccccctctttacggctgtagtcacgataaatcatcgacgccaccgcatcgacgcgcagcgcatcaataccaaaacgttcaatccagtaaagcgcgttaccgacgaggaagttactgacttcacggcgaccatagttgtaaatcagcgtgttccagtcctgatgatagccttcgcgcggatcgctgtgttcatacaagttcgtaccatcaaattcggcaagcgcaaagtcatcagtcgggaagtggcctggcacccagtcgagaatcacgttcagaccagctgcgtgtgcagcatcaatgaaataacggaagtcgtcgcgagtaccaaaacggcgggttggtgcatacaggccggttggctgataaccccaactgccatcgaagggatgctcgttaaggggcagtagttcgaggtgggtaaagcccatccatttagcataaggcaccagttgatcggccagctcgcggtagctcaaccagaaattgttgtcggtgtggcgacgccaggagcccaggtgaacttcataaatagagattggcgcatcaaactgattcgcttttttgcgctcttcagtctgtacaaccttttccggcagcccgcaaataagagacgcggtttccgggcgcatttgcgcttcgaaggcataagggtcggacttcagacgcaagttgccattggcatcaatcatctcgtatttatagagctgaccgttatgcgccccagggataaacagttcccagatgccgctctctttacgcaggcgcatcgggtgacggcgaccgtcccagtagttgaattgcccaaccaccgagacccgacgggcgtttggagcccagacagagaaacgcgtacctgtgacgccatccatagtatctgcatgcgcgcctaaagtttcatacgggcgcaggtgagtaccttcagataatagccaggcatccatttcctggattagcggaccaaaacggtaaggatcatcaatcaggttttgctgcccatgccagacaacagccaactgatagcggaaaaaattcttacgtcgcggaatgacgccactaaagaatccccgtgagtcgagacactccagttttgcgagtttgcgcccggttttcggttcaatcacccacacatcggtagcgtcgggtaaaagggcacggacttccagtcccgcggtggttttatgcattcccagtacggaaaaaggatccgcaaaatggcctgcaattagcgcgttaatcacgtctctatcgatacgatcggacatgcttgtcttcctgttttattgtgtcaccccatccaattggatttttgacttctggttgtgacatttttttgacctgaacggcgcagcactctgtgcatcctctctgcgtcgtcctcacttcaggtaaggctgtgaatactcatgtattcagccacccttaaagaatagccaatgctctatttaactcccggtaaatcatgaaacatctgcgcttactcctgtattacgcactaacaggggcggcatcgcgccccagatttaatgaataaagattacgccagttgacgaagcatccgacgcagcggctccgcggccccccacagcagctggtcgcccacggtaaaggctgacaggaactctggtcccatattcagcttacgcaggcggcctaccggcgtggtcagcgtgccggtaacggcagctggggttagctcacgcatagtgatttcccgatcgttcggaacgactttcgcccacggattgtgcgcagccagcagttcttccacggtcggaatcgacacatcttttttcaatttaatagtgaatgcctggctgtggcagcgcaatgccccgacacgcacacataaaccatctaccggaattacggaagatgtgttgaggatcttgttggtttccgcctgccctttccactcttcgcggctctgaccgttatcgagctgtttgtcgatccacggaatcaggctacccgccagcggcacgccaaagttatccaccggcagctcaccgctacgggttaaggttgtgactttgcgttcgatatcgagaatagcagaggacggggtcgcgagttcatctgctacatggccatacagatggcccatctgggttaataactcacgcatatgccgcgcaccaccgccggaagcggcctggtaggttgcaacggacacccaatcaacaagatcattggcgaataaaccacccaacgacatcaacatcaggcttacggtacagttaccgccaacaaaagtcctgatgccattatttaatccgtcggtaatgacgtcctgattgacggggtcaagaatgatgatggcgtcatctttcatgcgcagagacgatgctgcgtcaatccagtaaccctgccatccgctttcacgaagctttggatagatttcgttggtataatcgccgccctgacaggtcacaatgatatcgagggcctttagcgcctccagatcaaaggcatcctgaagtgtgccagtggttccgccaaaagacggcgcagcctgaccaagctgagaagtagaaaagaagacagggcgaatggcgtcgaagtcgcgctcttcaaccatgcgttgcatgagaacggagccgaccataccgcgccagccgataaaaccaacatttttcataagcgttttttcctgcaaagatgtgtgctgtataaatgtgccggtctcctcttggcacatctttcaccatacaaaaagcagccaaagtcgcaagtgaaattaatcaatgatagcgaagccatcagtaatgcgacttatcctgctttgttagcacgcagaaagtccgcggcaattatcagggaatttgagttatgaatgaaatcatttctgcagcagttttattgatcctgattatggatccgctcggaaacctacctattttcatgtccgtactgaaacatactgaaccgaaaagacggcgggcaatcatggtgcgagagttgcttattgctctcctggtgatgctggtgttcctgtttgcgggtgagaaaattctggcatttctcagcctgcgagcagaaaccgtctccatttctggcggcatcattctgtttctaattgccattaagatgattttccccagcgcttcaggaaatagcagcgggcttccggcaggtgaagagccatttatcgtgccgctggcaattccgctggtcgccgggccaactattctcgccacgctgatgttgttgtctcatcagtacccgaatcagatgggacatctggtgattgctctgctgctggcctggggcggcacctttgtcatcctgctacagtcttcgctatttttacgtctgctgggcgagaaaggggtgaacgcacttgaacgcctgatgggattgattctggtgatgatggcaacccagatgttcctcgacggcattcgaaggtggatgaaggggtaaggttcaaacaggtgctgcacacaaccagacgcggcacctgttttattacctgaactgataatgaccttcgcccaatcggataacccttccctcttcttctgcgcggttcagccacacactaatttgttcgatggttaaaccagtacaagacgccagcctttcaatacttatcgattcctttgcaaggatcgccagttccgccacaaagagttgataaaaatcgacaggcgtatacgcgggcattactgcgtaatttgcgtcatcttcatgcagcgaaaacagttctggttgagcgttacggagtgctctgtcatacatcagcccaggaacgtctggcagtctgatcgtcacattctcagcctgttcagcactccatgacgccccattttctactaatcgtgaattggctgattgcatatcctgatttggtttaacctgcacaggcagccactgatgttttaatgcctccatcgccccggttatcgttccaccggtcattcccgcacgtacaaccattgcgctttcagcaaggcaataaatatatttatttcgcgccatcgcattgccgacggtgaaacgtacctctgggtaaaacggcgaaatcaacaccaggttgcctgctataagcccttcacgccatttcactaacgtactcgtttttaacaagctatcagctaatacgccaacggcagttcccccggcctccagtgccgacgccattgcacattcatcaatacctcgcgcaccaccagagataacgcaaatcccctgttgggccagtttcgcggccagttgttgggtatagcgcaaatcgtcagtcggagcatctcgcgagccaacaatcgccataccttccgcttgcagtaatgctttattcccgcagccaaataaaacgggaggtgcatccgttcgcaatcggtttttcaagcgaacgggataatcagcatctccgcgggttaagatccataaaccggcgcgttgccacttatctaccgccaacgccagactatgaccacgcgccagcaagccaagaatacgctcctgagaaatacgcggatcgctccagcctgtaagtttctcttgcggttgcggcaccagaagctcggcgggactgatacgttggtgcttcagccataatgcaaacttcccccattcactattactaagaggtttatactcactcgccgccgcgcgagaaaaatcgctggttagcaggagagttgcttgtgcattggctgaaagattcatcaattttttaccgaggtagaagcaagggcaagaggataaaccgtcgggcaacctgcctggcgtaacagtgctgttagaactgtcagcgtccatgcagaatccacgatatcgtcaaccagcaacgccggaccaggcatcaaaggaggggtaatcacaaacgccccgtcgagattttgacactggtggaaacggttttgctgcattttctgcggtggattgtccacgactttttcaatggcatcaataaaaggtaagccaagtttcgccgccagtcgccgggcaaaatcaggaaccaggtcnnnnnnnnnnnnnaatcaggaaccaggtcgaggtgctttaatgaaggaacgcagcatacccaggttggttcaggatgcggattccagcgttggcgaaccatttccgcacatgcctccaccagttcatcactgaatcgccccgtttttttctcctgtgctacctgctttccccacccggaatatccccaacgagaaaggattctccccgtagatccttgtaaactcgcaggcaagttccctttaaatccgtattgcgtaaaagccccagctgccacctgtttattgagatttaatgacaggtcagcgtgtttaataaataagtttgccgcatggagtaagccgctatcaatgtcgggcgacaacaacggatgctgaagacaactgctacatttaccacaatgttcggcacctggctcatcgagtgcgcggcgcagaaattgcattttgcactccttggtcgtgatatagctttcaacgtctgccagctcactttttctctgattcatcaaatggttaattcgttcatggtcaggagaaaaactgacaattgttctgcgccataatttctcggtatacaccacaggcgatggattttcagctaccaataatttcagtgctttttctatttgcccataacggagattcgtccgttgttcaatgcctcgtaaggtaagaccgtcattcacgctaagtacgttgagtatttcatgaatttgcgcctccgcaggaaaggcgctttcacggaagaatttatgaatagcacggtcttcactgccgcaaagcagtatgccaacagcagaatcgataccgcgaccggcacgccccacctgttagtagtaaccaactatcgaacctggcatctggtaatgaataacaaaccccaaatccggtttgtcaaagcccattcccagcgccgttgtcgcaaccagcactttaattttatttgccagcaacgcctgctccagatattccctggcagtattagaatcttccgcgccttcacaagtcacgccgctgtagtaagcaaatgcactgataccatttttccttaaccactcggcgacaagttcggcatcgcgagtagtcagggtataaacaattcccgatttggaaaactgagggataaccgttgctaaccatgccagacgggatgactgttcacctaagactaaggcatcaagcgccaaactttcgcgagccagcgttccacgctgaatcacaatgtcacccaattgctgacggatatcctcaacgacacggttattcgctgtcgcggttgtacccagaacaggggtattcgcaggtagttgcgcaaaatatctaatatacgtcggtaatccgggcgaaaatcgtggccccaatcagagatgcagtgcgcctcgtcgaccacaagcaagccaatatgatcggctataggatataaaaccgtttcgataaagtcctggtttgccaaacgttccggggaaaccagcaagcaatcgacctcaccttgcagcaacttatcgctaatgcgctgccattcttctctgtttgtagaattcaacgtttcagccgtaatacctaaccgttcagcggcggcaacctggttacgcatcagggcaagcaaaggagagatgataattgtcgggccagcgccgcgatcgcggaagattttactggcgatgaagtacacagcacttttcccccagccagtgcgttggacaaccagcagttttcgccgttggttcaccaccgcgtctatggcttcccattgcccttccctgaaagtagcggtggtatttcctaacatccgctgtaaaagcaattcagctgcgtgcttttccatctttatctcctgcgatctttaggcagtgattagaacggattatttgcaggtaaatttgcgagagagatcaaaaagatgaagagaggagaaaagagaaatgaattactgcgagcaagctcgcagtaatttgtcgcagtaattaactcaacagctggaacgcaatcatcccaacgatggcaccgacagtgccgaggatggtttccatcatggtccaggttttcagcgtttcggcttcggtcgcgccggtaaatttaccgaacaaccagaaaccagcgtcgttaacgtggctgacaacaatcgaaccaccggcgatacaaatcgacagcgccgccatttgcgcaccggagtagttcagttgttcaataaccggcatcaccagtcccaccgccgttaaacaggcaacggttgcagaaccctgaatgatgcgcactgcagcggccagcacgaagcaggtgatggcaatcggcaggcccatgccggttaacgcttcgcccagtgccggacctacgccagagtcaaccagcacctgtttgaacacgccgcccgcaccaatcaccagcagaatgatccccgccggttgcagcgcgtgaccgcaaatctccatcactttgtcttttggcatgccctgacgcattgccaggccataaatcgctaccagacaagcaaccagaatcgcggtaaacggatgaccaataaactcgaaccattcgtaagcggtagagccttccggcacaaaacgcgcggcaatggttttcagccctaccagcaccagcggcagcaggatcagcgacaggctgaatccgaaggatggcattttgccttcgccgagatgcggttcgctgatgtcgtcaggaatatgcagctcaacgtaacggctgatgaagttaccccacagcggcccggcaataatcattcccggaattgccgcacacaggccaatcaggatcatccagccaaaatcggcgttcatctgcgatgccagcagcattggcgctggccctggcaccaggaacgccnccgcggccgccacgcctgcgaataatgggattaccagcttcaccaggttcgtaccggtgtggcgcgccattgagaaagcaacgctaatcagcagaacaatcgccacttcaaagaacagcggtagcgcacagaccagccccgcaaggccgatggcataatgcgngcggctgtgaccgaaggatttaagcattttgacggcaatctgatcgactgcgccggtttcatgtaagatcttgccaaacatagctcccagggcgacaaccaccgccaggaagccgagggtgcctcccatccctttttccatcgtcgctgcgattttatcgagcggcataccggaaaaaaggccagcccccatggacaccaccattaaagccaggaaagcgtgcatacgcgccttcatgactaaaaacagcagcagtaaaacagaccctactgctgttaaaacaagcgttaatgtagtcactacttatttgccttttttaataacctcaatggtgcttgccacaacaccttccagcggttgatcgatatccaccaccagtacatcggtttcgtccgcacccggctcctgcagcgtttcaaactgcgtcaccaacatttgggttttaaagaaatggcctttgcgcgctttcaggcggctttcaatcacatcaaaatcgcctttcaggtagatgaaagagagattcggattaccttcacgcagcaagtcacgatagtgttttttcaatgcagaacagacgatcagcgacactttattagtgcgctgcatagcaaacgcggcgtcgttcagcgcctgcaaccacggtttgcgatcgtcgtcattcagcggttcgccagacgccattttttcgatattgcgccgtggatggaggaaatcgccatcaagaaacgcggcatgaagttgatgcgccacttcacttgcgaccgcagatttgccgctgcccgatacgcccatcaagacgtaaatgtggtgatcatggttagtcgtgctcaaagtggtgcccccacaatacaagaattaaaaatgttacgggtaactgttatcggtaacattgtccagccggacaatatcagaagcaatatccatccgtgccttaagtgtataagtgtgagctacttcaaatttgtgnnnntaaatagatccgcccggtgacaaggtgaaacctaaatctaacattttcggtgtcacagattcgccacgaatacgcgccagcaggcgttcagcgccaatactgcccatccgctcacgcggcgtcagcacgctcgcaagtcgtggctccatcacctgaccaatgtcatgaccgtggaaaccggcaatcgccatatcgtcaggaacttttaaccccagacgctgacattcaaacgccgcgccgaccgccagatcatcattagtacagaacacgccatccagctgcggatattcccgccgtgcctggcgaatcagttcaataccggaagagtaagaagaagattgctcaaccatcacgctatatggcaccaggcctgcatccagcatcgcctgttcgtatcccttctgtttgatgatagtacgttcgtcgagacgtgcgccgagataggcaatgtggcgatgcccgcgagcaataatggctgtggtcatctggcgtgccgcttcaaagttatcaaaaccgacggcgatatcgagacacggcgactggctgtccatcaactccaccaccgggatccccgccacttcaatcatctttaaggtgcgcggcgtgtgggtacgttcggtgaggatcagtccgtcgatattccatgagagcattgattcgagacgttcttgctccatttccggtttataaccgtagtgggccagcatggtctgataaccgtgcgcgtcggtgacgctttcgattccgcgtaatacttccgcgaaaacctggttggtgagagaaggtaacaggacgccaatcgcccggctggtggcgttagagaggatatcgggcgcacgattgggaatatagcccagttcatcaagagccnnnnnnatcttgccgcgtagagcgacggaaacctgctccgggttgcgtaaaaaacggctgaccgtcattttggtcacgcctacacggtcagccacatcctgaagtacgggtcttttctttttcatcgtcctgaaggtacaaaagagatagattctcttagtttaacacggacgcatcagaaccttcccggggaaaacagtgcttgtttacaattattagatatacactaaatcaattgcatcgcattgtgctaacgacgctgcaaaaccccggaagcgtacatcagcacgcgaccggagcgagcgaggaagcctgcaaaaaggcaggcttcaaagatgccgttgagctttaaaccggcggcagatcgaacagtaacacttcgctgtcgctatccgcatggatggagattgcctgctcatcccagattgccagaccatcgctgatcgaggctttcacgccgttaatggtgacattgcctttcaccacctggatccagacgcggcgttcagcggcaatctgatgcaccgactgctcatctttcagcaacgcccagcggtacagttccatatcctgatgcactttcaatgaaccatcacgcgcatctggcgaaagcaccagttgtttgccctgcactgcatcgaagcgacgctgttcataacgcggcgtaatgccgttttcttccggcatgatccagatctgatacaggtgcagacgctcggtgctgcttgggttgtactctgagtgacgaatacccgtacccgcactcataatctggaactcgcccgccggaacctgctctttattgcccatgctgtcctggtgctcaacagtaccttccagcacgtaggtcaaaatttccatatctttatgcgggtgagtgccgaagccctgccctgcttcaatcacgtcgtcgttaatcacgcgcagcgcggagaagcccataaagttcggatcgtaatagttggcaaaagagaaagtatgccaggagtccagccagccatgatttgcatgaccacgttcatttgctttgcgtaagtagatcatttgtattcgccccctgaatgatttcgatgggcttagtgtggacccgatctgcctgggatgatagagggtgaaaattgacccctctgttcaaaaaaattgaactattcgaggggccatcaaacttacttcgcgagagtcactgtggagggagaggcttgctcgaatccgcgttcaagtatttccagattcgtaagaacttcagattccttgacgtaatttggcgcaccgtgggtgatggtttgatacaacgcatcataaacgcgcccgtaatcgcccatctccggcttcatctcttctctgaccgtcacgccctcgtcattgacatactccagcacaccgaccgaatcatccgctgcgaatcccggttcgcccggcataatattagccttcaggctggtttcctgctggtcgataccatatttaataaacgaacctttcttaccgtgaacgataaatttcggataatcgattttcaccagatggctggttttgacgatggcttttagatcgccataaaacagttgcgcttcgaaagtatcgtcaggattggctttattgcgcaggctgcggatgtcataagcgacgtgatccgggcgaccgaacagagaaataatctggtccatcgtatgcacaccaaggccatagaacgcgccatcctgcggcagcccaggtttggtttctgccaccgggcggtaatagtcaaaatggctttccacttcgacaatctctcccagcttgccgctttcaatcgcttttttcgccgtcaggaagcaggaatcaaagcgacgattctgatatggcgtgacggtcagccctttgcttttcgccagtgcaaacagctctttcgcctgcgcaagtgtcggagtgaacggtttttcgaccagcacatttttcccggcttccatcgcgcgcttcgcgtactcgaagtggctgtccgcatgggtgcagacaacaaccagcttaacatcgggatcgtttagcacttcgttgagatcgctggtgaaatggatatgagagtaaatgggagcttgttcttccggctttgcatggcggcgaaaatatgcgcgacatgccagctatccttgcggttaagtacatacggcagatggtaacgggtggtgcttttgccgaagccaataaaggcgcagttgatgaccatgatttcgtcctttttaaggtggttatttacaccttagcgcaaagcggacgtggttcctactggagtgcgcataacgaacacaagcacttcccgaggataaattgagaacgaaagatcaaaaaaaaaagccagcacccggctggctaagtaatactggaagcaatgtgagcaatgtcgtgctttcaggttctccgcgagggtcttcctgattgcgagacaataataatcattctcattcgcacttgtccaacactttttgcaaaaaaatgcatttgactcgcattcgaaagtcaatgatgttgaaagggacatttaccccaaagaggacaaaggaatgagtgagatagtgatacgccatgctgaaacacgggattacgaggccatcaggcagattcacgcccagccggaggtgtattacaacacactacaggtgcctcatccttccgatcatatgtggcaggagcgactcgccgatcgtcccggcatcaagcaactcgtcgcctgtattgatggagacgtcgtgggccatctcaccattgacgtgcaacagcgcccacgccgcagtcatgttgccgattttggtatctgtgtcgacgcccgctggaagaatcgcggcgtcgccagcgccctgatgcgagagatgattgaaatgtgcgacaactggttgcgggtagatcgtattgagctaacggtgttcgtcgataacgcgccagcaattaaggtctataaaaaattcggctttgagattgaagggactggcaagaagtacgcattacgtaatggtgaatatgttgatgcgtattttatggcgcgggtgaagtaaagaattttctcaaattgcctgttaccaatgtgaataattagttttgttcatctaatttgagtttttccttatattaccaccatcattttgaaacaatttgtaacatcaagagacctttgaatcattactcgttaatatttcttattaaagagaacatattttcgcaagcaatagttattactgtttgtttatggatagagagtctacttaatgggtacagcagctataagtcatttacgatatgatcttaacaaatatgccctttctttacgcaaaaccgcaacacttgcttcaacattttttattgagtccccattagttagattcgagtatctgcaagaaatagaaaatactattaatgatattactcacagattcaattcttcatatgacatcaatgaaaaagcacgacttatcaatgaattaaaaatggagtcagaaacagcaagaaaagaatatcaacttttcagacaaggaaattatgataaatatatcactactgatattttcgaagaacatggtttgataaaatatgtgaacttaagtttcgatattgttgcatctgtaggacaggtcgtaggcggggttggcgcgttgaaatttggtaaggtagtgcattcaaaccgaataaaaggtataggcgtcacattagttgctcatggggcgaataatttttatgaaagcttatcacctttattttttaacgagtatgattcagatccaatacgtgaactctacagagtaatagcaaaaaaaatgggaggtgatattaattctgctgattatgcatacagcatcgtggacttttcgattactgcatatggtggatattcaggcatgaaaatcgtacctaagtataatagattgattcgtccttcattaggaaatagacctggtacaggacgattatttcattacacatcagttgattttaaaaataaattctcattaaaacctacccctttaaaaatcatacaaattagttctactgtaaaaaaattcaaggttacattttatgnnnnaaatacaaatttgaggataaaacatggcctcaataatcatatgccacatcaattattaatgaatatatcaggaactacaactggtgcaggaatacaataacagaataacttaattttaagataaaacattttgaggcataattggtaagagaatttagtatccagttttctgtgtatgataagaatagcgaacatggcaatactaacgattgaagacagaaaaaaacttttcaacatattatcctgaaaaaatgagaatacaagcaatatcccattaactatacttaccaacccaaaccccaaagagcaataacccaccattgaaataatagcatcaatgaaattttgttctacgagagagacttcatgcttattagcaagtttcttcatttctttgtatcttgattttaaatagaagagttcttgtttattaagtacagagagaatcacgtattttgctttcattattcccccttaaaaacactttacaaaatcgatcaaagtcatgatgaatgccattatgcacataaacaacacaaagcgtgatatttaaatcaataaattacactctaaaatgaactataactacagtttatttaatagcatagttaattcctttcctgaatatcaggaagtaattatcgcacgtcctattttcacggtaaatgaaaaactattctgcatactcttgaaaagaaagcataacntaagccccttaaaagcattcaggataattatgattatatattacggagcaatagtaaaagcaatccagacantaatttatcttgttcaagaaaacagccnnnnnnnnnncgaagagggccgctaaccttagtaccccgccgttaaatcatccaccgagcgcgggtcggatgcgccgtacaactcaccgtccggcccaaccataatgctttgtgtactgcccatcgcctctttcagcgccactttctgaccttttgcttccagcagcttgagcgtatccgggctaaaccctttttcgacacgcagctcgtccggcaaccactgatggtggaaacgcggcgcattagtcgcttcggcgacgttcatgccataatcgatgctattcaccaccatttgaagcactgtagtgatgatccggctcccgccagggctaccggtgaccagccaggttttaccgtctttcaccacaatggttggtgacatcgatgacagcgggcgtttgttcggcccgacggcgttggcatcaccgcccaccagcccgtaaacgttcggtacgcccggtttggcagagaaatcatccatttggttattgagcaaaataccgctctcgcccgcgacaatacccgtaccgaaggtggtgttcagcgtataggtcaccgccaccgcgttaccgtctttatccaccaccgaataatgggtagtttgattactctcataaggcgcaagcttgccggggcgaatctcgctggacggtttcgctttattgatatcgatttgctcggcaatagatttggcataggctttattggtcagcgcctgccacgggactttcacaaaatccgggtcgccaagatattccgagcggtcagcgtaggcatatttctccgcttctgccatgatctgcatcgcgtcggcgctgccaaaaccgtatttcttcatatcgaagttttccagaatattgaggatttgtacgatatggatcccgccggaggatggcggtggcatggagtaaacctgatacccgcgataatcgccgcttatcggtgtgcgttcgaccgctttatacgccgctaaatcttctttagtgatcaggccaccgtttttctgcatctcctgggcaatctgttccgctatcgtgcctttgtagaattcgtccgggccgttttcggcaatcatctccaggctctttgccaggttcgcctgcaccagcttgtcgccctttttcagcggctcgccctctttccagaagatagccttgctgttttcgtgattcggcagcacttcgctcccgtaggttttgagatcgtcagccagctcgtcgttaacgataaaaccatcgcgtgccagtttaaacgctggctgcaccactttgttcaacggcattgtgccgtatttatccaacgccagcgagaaaccagcgaccgtaccgggcgtgccggaagccagatgcgaagtgagtgattttttgctgtccgggttgccctggtcatcaaggaacatatcgcgggtcgctttggcgggtgccatttcgcggaaatcgatagcggtggtattgccatttttcgagcggatcagcataaaaccaccaccgcccagattccctgcctgcggatgcgttaccgccagcgcgtagcccacagccacggcggcatcaacggcattcccgccctccttgaggatatccacccccacctgagtggcagtagcatctacagatgccaccatcccctgtttcgcgcgtaccggatgaaagacatcttcctccacgccgtaagaaacaggagacggcgcaggtggcgcggctaccgtactaaaacaacttcctgtgaacagagcagcaatggccacccggcgtaaaaacgtcggttttatcatcgttattntccagagattaaggggcaaccccagctaagcctggtatataactctgaattaatcctgatgattgcaggaaaggagtaaacttaaagaatatcttcagaggaggatacgcgatgaaacgacttctgattcttacggcactcctgccgtttgtcggctttgcacagcccattaatactctgaacaaccctaaccagccggggtatcagatccccagtcagcagcggatgcaaacccagatgcaaacgcagcaaatccagcaaaaagggatgctgaatcagcaactgaaaacgcaaactcagttgcaacaacagcatttagaaaaccagataaacaataattctcagcgggtgttgcagtcncagccgggggagcgaaatcccgcccggcagcaaatgctgcccaacaccaatggcgggatgttaaacagcaaccgtaatccggatagttcgttgaatcagcagcatatgttgccggagaggagaaacggcgacatgctgaatcagcccggcacgccgcagcctgatataccgttgaaaactattgggccgtaaagttcggaccaatcacatcaatcgcatcggtacagatgcaatccacgccccagcgcagcaactctgccgcgcgctggggtttattgacggtataaaccagaatccgtaatccggcgtctttcaactgcatcactcgcgctttatcgagcaacttatgattgagatgaatagagacgcagcccagccgcgcggtcagttctcgccagtcgtcgcgccactcatccagcaacaaaccgcgnggcagttctggtactgcctgttgtgcggcttctaaagcatcaatctcaaacgatgacagtagcggcggcgtcataccggcccacagctcgcgtgccgccagcgccaccattttgcccgttaatggcccagtgccagtggtgggtttgatttcgatattcgccatcatcccatgttcgcgacagcgttccgccacctgcgaaagcaacggcagcggctcacctttaaacgctttgccgtaccaactgcctgcatccacacgtagtaaatcctgccagttcagttcacccgcgacgccccagccgttgctggtacgttcgagattgtcgtcatggagcaggaagatttcgccatctttcgacaacttcgcgtcaaattcgatcatcttatgaccgtattttgccccgacgtcgattgccgccagggtgttttccggggccagtttaccgccgccacggtgggcgacgatgcggggataaggccagttactcatactcgttgtcctgtttcaccatcaaaaagatgtagctgattttccggcagatgcagccacagcgtgctgcctgccgtcgggcgctcctgatgcgccagccgtaccaccagcttctgttcgccccagcgtccgtgcgccaggttatctgcgccgaggatctccagcgtgtccatcaccagcggcacgccgccttctgcctgcgagcttagcgcgatatgttccgggcgaatgccgagagtcattttacgccctgcatactgacggtagccaccgtttagcggcagcgcaatgccgccgtccagctcgaagtgcgtgccttcgttattcacgcggcctgtcagcagattcatcgccgggctgccaataaaactcgccacaaacaggctggcgggcttttcgtagacttcaactggtgtgccaatctgttcggcaacgcctccgttcatcaccattactcgctgggcgagggtcatcgcctcaacctgatcgtgagtaacgtagagtgaagtcgttttcaggcgacggtgcagctgttgcagttcaagacgcatctgtacgcgcagcttggcatcgaggttagagagtggctcatcaaacaggaacaccgccggatcgcgcacaatcgcccggcccatcgccacacgctgacgctgaccgccggaaagctcgnnnnnnnngcgcttaagcagaccgtccagttccagaatgcgcgccgcctctttaacgcgctcggcaatttgctgcttgcccatgccgcgaattttcagcccccacgccatgttttcttcaacactcatatgcggataaagcgcgtagttctggaacaccatcgcaatcccgcgatctttcggctccatttcggtcacccgctggtcgttgatccagatatcgccttccgtcacccgctccagcccggcaaccatgcgcagcagcgtcgatttcccgcagcctgacggcccgaccatcacgataaattcgccatccgccacatcaagggtcagcggtttaatcacctgggttttgccatcccagcttttggttactgcctgtaatttcagtcctgccatcttatttctcactatcgaccaggccgcgcacgaaggcacgctgcatcactaaaacaatcactactggtgggatcagggttaacaacatcgccgccatcactgagttccattctgtggtgccttcgccagtggcgatcatccctttgatccctgccacggtggtgccgagatccacgtcggtaataatcaacaacggccacaaatactggttccagccgtaaataaaggtgatcacaaacaacgccgccagattagttttggacaacggaaaaacgatgtcgcaaaagaagcgcattggcgacgcgccgtcgatccgcgcggcttccaccagttcatccggtagggtcataaagaactggcggaaaagaaacgtcgcggtcgccgaggccatcagcggcagcgttaaacctgcgtagctgtcgagcatcttcaggttggcgatgacttccaccgtcgggaagatacgtacttcaaccggcaacatcagggtgataaaaatcatccagaaaaagaggttacgcagcggaaaacgaaaccagacaatggcgaatgccgagagcatcgagacggtaattttgccgagcgtaatgctgaacgccatcacgaagctgttaagcaacatccgccagaacggcgcactatttgtgcctaccccgtttacccagatgttgtggatgttttccagcagatgcgtgccggggatgagcgtcatcggcgcggcgtagacggcctgtttatccagcgtcgccgcgacaaacgccacgtacagcgggaataggatcaccgcgatcccgaggatcagcatggtatggctgaatatcgtcagccacggacggttctcaatcattggtaacncaccttgctttcaacatagcggaactgcatcaccgtcagcacgatgacgaggaacatcaacaccaccgactgtgcggcagacgaagccagatccagtccggtaaagccttcgcggtagatcttataaatcagcgtcgtggtggcctgaaccggcccgccggacgtggcggcgtcgatcaccgggaaggtgtcgaagaaggcatacaccaggttcactaccagcaggaagaaactcaccggggcgataagcggcagcgcaatcttaaagaagcggcgaatcggccctgcaccgtcgatggctgcggcttcgatcaacgaacggggaatggattgcagcgcggcatagaagaacaggaagttgtagctgatttgcttccatactgaggcaaacaccaccagaaacattgcctgaccgctgttttgcgcgtggttccagtcgtagccgaactcagcgagaaaatgggtgatcagcccgcgaccggggttaaacaggaagatccacaatacggcggcaacggcgggagccacggcatacggcagcagcatcaaggtttgatagaaacgactgccgcgcacgatgtactccaccagcgccgcaaagaacagcgataccagcaaaccgctgacggtgacaaaggtgctgaattttatcgtcgtccagaaggagtcgatatagtagctgtcatgaaacagcgcgacgaagttatccaggccgacaaaccggctggagaaaccaaacggatcgacgctttgcagcgagtaccacaacgcttcgcccgcaggccagataaaaaagataacggtgatgatgagctgcggcgcgaccagcagataaggcagccagcgcgagcggaacaccgaacgggatgatgacattacggttaattcctgaactgtgccnnnnnncgcttcgcttatccggcctacacgcgatgccaggtcagataagcgaaacgcatccgacattacactgattaagacttcgtcgatttctcaaagcggcgcagcaactgatttccacgctcaacggcggtatccagtgcctgctgtggtgtcttcttaccggtccacacgctctccagctcttcatccacaatcacgcggatctgcggcatgttgcccagacgcagccctttggtgaacggcaacggcggcttattcagcatctgacgcgtcgcggtatccgcccctgggtttttctcataaaagccctgctcacgggtcaggtcatacgctgctttggtgattggcagataaccggttttctgatgccactcggcagcgttttctggcttcgcgaggaagtcgaggaacttcgccacgccggtatacgtttctttatctttgccctgcatcacccacaggctggccccgccgataatggcgttttgcggtgcatctttcgcatcggcgtcgtaaggcatcatgcctacgccatagttgaatttggcgtactcgcgaatattagcgagagaaccggaagaggcggtggtcatagcgcaatcaccgttatagaacttctcggtggattcatccttacgcccgacgtagctgaaatcgcccttcttgttcatctcttcgagcatggcgatgtgtttcacctgctccggcttgttgaactccagcaccgcatccgtgccgtcaaagccgttgtttttgctggcaaacggcagaccgttccaggcgctaaagttttccagttggatccagccctgccagccgctggcgtagccgcacttcatgccggaggcttttagttttgcggcatagtccgccagatcctgccaggttttcggcggttgttccgggtctaaccccgctttcttgaaggcgtctttgttgtaatagagaacgggagtcgagctgttgaatggctgggagagtaagtggcccgttttgctgtcggagtagtaaccggaaaccgtcggcacaaactgcgactcatcgaattgaatccccgcctctttaaacacgtcataaaccggtttaatggctttcgacgccatcatggtggcggtgccaacttcataaacctgcaaaatagccggagcattgccggtacgaaatgcggcaatccccgcgcttaaattctgttcgtaattgcctttataggtcggtacaattttgtaatccgggttttcggcgttaaaacgttgggccagagaatccacctctttacccagttccccttccatagaatgccagaacggaatggtcgtcactgcctgtgcattccccattaacgccagtccgagcgccagtgctgaagctgtataatgtaacggtttcatcgtttatctctcttgttgtaccgaatgcgcgaattcacgcgttttatgctcgcggggtaacatgacatgctcgaattacagaaaaataacttttttgttacatttgtaagatagtaaggtgtcagaaagatgacaaggcggtgacggtacgggtgagggaaaatgggagatggggcacggatatcccgagaatgcactgaaaagaggcgattaacggccagctaatcgccagaactccttaccatgaagagcaaaaatggcagcaaattctgcgtccaattttgctgcccgatgagagctacatttttcaattttaacaaaagattgccgcgacactggtctaacggcaaagaagattttcattgcaccacactctgcttcagccgctcattggcggtcttaatccattcccggtggtgttttctataatgaggtcttgagcgtttagccgtatcaaccacggcaacatactgctcgttggcttcacgtaaccgactcattttcgccaacatttccgcatagtaaatacgcgcctgcgggccggggtaataagaaatcaatacttcaaactcgctttccgcatcagcgtatttttcttgtgcggctaacgttctggcaaataacaaatgcccgtctgccgactgaaaatcagggttataacgcatcacatcttccagcgtctgctgacaggcggcgaactcctgaatagcaaactgtgcctgcgccaggcttagcatcattgccgcttcatgggcgaatatcccgcttaacgcctgctgataatggggaacagcttcgtgataacgccccagacgcgccagttcattagccaacgcataatggttttgattcgtctcggcaatcgccagttcttcggttaatttgcgcaggtggcgctcagggttgagtttgtcctgcaggcgcatcagcaaagtatgcccgtgacggtcagcgcccgtttcaggcagcatcactatgacgaaatacgccacgcagccaatcaccggaaaacagaaaatgataaaaatccagtaccgctcttgtccggtacggtaagcgtgaatacagcaaagcagttcaagcatgacaacaacggcataatgcatgggagggaacctttccgtggcaaataagtggtctggttttaatcctcccggtcagttgaaacaagtctgtatacggacgaataacccggcagaacttagctgccgggttatcgataatttacccgcctaaatacgcacttctcactgcttcgttcgccagcagcgcatcaccagtatcggagagcacaacatggccgttttccagcacgtagccgcgatcagcgagcttcagcgcctggttggcgttctgctcgacgaggaagatagtcatcccctgctcgcgcagctgctcgatggtgtcgaaaatttgctggatgataatcggcgcaagaccgagcgatggctcatcaagcaacaacaaacgcggattgctcatcagcgcgcgaccaatcgccagcatctgctgttcaccgccggacatggtgcctgcccgctgaacacgacgctcatgaagacgtggaaacagctcatacacccactttatgcgctcctgaaactgatcacgttcggcaaaaaagccgcccatcgccaggttctcttccaccgtcatccgcgagaagacgcgacgcccttccgggacaatcgctaccgcttcgcgcatgattttcgccgtctgccagtcggtaatgtctttatcatcaaacacaattcgcccgctggtggcgcgcggatcgccgcataacgtgccgagcaaggtggttttccccgccccgttcgcgccaatcagcgtgacaatctcgccctgattgatatgcaggctcacctcatgcagcgcctggattttgccgtagtgggcgctgactttgtcaaaggacaacatgactttttccatcttatgcctcacctaaataggcacggatcacgtccgggttattacggatttgctccggcgtaccgtttgccagcggcgtcccctgattgaccacgtaaattcggtccgaaattcccatcaccagcttcatatcgtgttcaatcaacaagatagtggtgttgtgatgattgcgcagttcggcaatcagctcatccagctctttcgtttctttcgggttaagacctgccgcaggttcgtcgagcattaaaatctccggctgcgtcaccatgcagcgggcaatctccagacggcgctggtcaccgtaggccaggttactcgcctgacggttggcgtgttccagcaaaccaatgcgctcaagccaggtggcggcgcggtcgagcgcttcactttgggcgcgacggaaagaaggcgttttcaacaggccagagaacagcccggttttcagttgctgatgctgcgccaccagcaggttttcaattaccgtcatttcgcggaacagacgcacatgctggaaggtacgcaccacgcccatgcgggcgatttgctgccccggcaaaccctccagatgctgatcgcgcagtaaaatagtgccgccggtgggtttgtagaatccggtcaggcagttaaagaccgtggtttttccggcaccgttaggaccgattaacgagacgatctcctgcgggtacaattcaagattgacgttattcacagccagcaggccgccgaagcgcatcatcaggccgttaacagataataatggctgactcatgcctgctctcctttcgctgcgccgtttttcagcttcagttgcgggcgcgtcatgggcagcaagccctgcggacgccagatcatcatcagcaccatcaaaccaccgagcattaacatgctgtattcgttgaaatcacgcatcaactcgcgcgacaccaccagcaaaattgccgccagaattaccgcaaattgcgagcccataccgccgagcaccactatcgccagcacaaacgccgattcggcaaaggtgaaggattccgggctgacaaagccctgacgcgcagcaaacagcgttccggcaaaaccggcaaacgcggcgctgatggtaaaggcagtcagcttgatacgacgcgggcttaagcccagcgaacggcaggcgatttcatcttcacgcaacgcttcccaggcgcgacccagcggcatccgcagcaggcggttaatgacaaacaggcttagcaccaccagcagcaacgccaccaggtagaggaaaatgacacgatcggagggatcgtatttcaggccaaagaaattactgaacgtgtcccagccgccttcacgagcggtacggctgaactcaaggccgaaaaaagtcggtttcgggatctgactgataccgttcggaccgccggtaatttcggtgttattgagtagcaatatgcgcacaatttcgccgaaaccgagggtaacgatcgccagatagtcaccgcgcaagcgaagcaccgggaagccgagcaggaagcccgccgccgccgccatcaacccggctatcggcagacaggtccagaagcccaagccgtaatagtgattgagcagcgcaaaggtataagcgccgatggcgtaaaagccgccgtaccccagcaccagcagaccagaaagccctaccaccacgttcagcccgagtccgaggataatgtagatcatggtcagggtggcgatatccaccgtcccgcgtgagaccataaacggccacgccaccgcaagcaccagcagcgccacgagaaacagcttttgcttcaccgtggagccatcaatggcgggcagaataaacttcggtccggaaacgcttttcaaccctttctggaaagccggtcgcaaaagctggaagaaaaagaccaccgccgtgccgataaacacccactgccaacggatgtctgaagccgtgtcgaccaccagtttggtgccatccagctccagttgtacgcccataaagacgcccgccaggacaaaaaacatcgcggcagagagcaacgccattgcaatatgcatcggtttcatactttctctacctccgggcgacccagaataccggtcggcatcaccagcagcaccagaatcagcagggcgaatgagaccacatctttatattccgtactcaggtaggcagaagagagcgcctccgcaatccccagaatcagcccgccaatcatcgctcccggaatgctgccaatcccaccgagcaccgcagcggtaaaggctttcatcccggccataaagccgatataggggttaatgacgccgtagaactgaccgagcagtacgcccgccaccgccgccatcgccgcgccaatcacaaaggtcaaagcaatcacccggtcggtgttaatgccaagcaggctcgccattttcagatcttcggcgcaggcacggcaggcgcgccccatacgggaataacgaatgaaaatcgtcagcgccagcatggcgaggaaggtgacaatccagatcaccgcctgcatggtggtaatagaggcagagaagttttcgctatgacccactacccactgaccattaaacaagctgggcagcgccacgtcgcgcgaaccttcagtcaggctgacgtagttttgcaggaagatggacataccgattgccgagatgagtgcaatcaggcgcttagagttacgcaccgggcggtaagccacccgttcgatactccagccgtaggcgctggcaatgacgattgcgccgacgaatcccgccgctaccagcagccagccggtatcaatgcccatcatcatcagtgcggcgatgatcataaatgagacgtagctgccgatcatgtaaacctcgccgtgggcgaagttgatcatgccgataatgccgtaaaccatggtgtagccgatggcaatcagcgcgtaagtactgcccagcgtgacgccgttaaacatctgctgcaagaaatacaaaaactgctcagacataaggtaacctttctaaacccgcccgcatttcacgggcggtgggattttcacttggctgccgtggatgaaccgtcggcgtgccactggaagacaccaaaatcaaatcccttaagatcgcctttttcatcccagttcagcggcccaatcacggtgtttgcaccgttagcttttaaatctttcaccagcgccagcggctcatcgctgccggtacgttcaagggcagttgccagagattgcaccgccgcgtaggtgatccagacataaggcccggacggatctttcttgtctgctttcagcgcatcaacgatgccctggtttgccggatcctggtcatagcgttttggcatagtgaccaacatgccttcggcggcatcaccggcaatgttcgacaacgacgcattacccacaccttccggccccataaactgggttttcaggccaacggaacgggcctggcgcagcatctgccccatttccgggtagtaaccgccgtagtaaacgaagtcgatgttttcttttttcaggcgggcgatcagcgcggagaaatctttctccccggcggtaataccgtcgaagaagacgacgttggcgttagccgctttcagcccgtcctgcaccgaacgcgccagcccttcgccatactgttgtttgtcgtgaatgatggcgatgcgctggggcttcaccgtctcaagaatgtattttgccgccgttggcccctgggaagagtccagcccggcagtacgcataatgtgttgataaccgcgttgggtcagctccgggttggtcgctcccggcgagatcataagaataccttcgtcttcatagatatctgacgcaggctgggtagaagaagaacacagatgaccaataacgtatttaatgccgtcattaacgattttgttggcgaccgcaacggcttgtttcgggtcgcaggcgtcgtcatattctacgccaaccagcttatcgcctttaattccccctttggcattaatgtctttaatcgcctgacgcgcgccgttaaattccatatcgccccactgggcaatcgggccggacatcgcgccgacaacggcaactttaatatcgtcggctaaagcggtgtgtgaaattgccagtgcaatcatccctgcgatgatagttttcgcattccgtttcatagtcaaaaatccccattcgtgatgttgtgttgctttgtttttatgtgttaacaaatcagactgttctttttttatactgcactgtttttgcctgtctgattaagggtttagcgcagtattttgtgataatagcgattaaagtccctatttttcagtcgattaagaacagataatattctgaatttattgatagataaacagaaaaaagtgcctttgtcagcataaaataacggcacaaagggcggaataattcactaccattcaggggattatgctgggtatttttcattctctaatgttttaactttgtaattattgctgttaaaaaattaatcacctgccaaaagaaataaaaaagagaaagcctccgattaaattatttcgctacactggttccacttttgtgatttacacgggttacccatgaagctgaccatcattcgattagaaaaatttagcgaccaggaccggattgacctgcaaaagatctggccggagtattccccttcctctttacaggttgacgataaccaccgcatctacgccgcgcgttttaacgagcgcctgcttgctgccgtgcgggtaaccttaagcggcaccgagggggcactggattccctgcgcgtgcgggaagtcactcgacgtcgcggtgtggggcaatatctgctggaagaggttttgcgtaacaatcctggcgtttcatgctggtggatggcggatgcaggcgtggaagatcgcggtgtgatgacggcgtttatgcaggcactgggatttacggcacagcagggcggctgggagaagcgttaatcgctctgtgtaaaaagcagttcaatggatttggttgggaaaaataacgcattttcgttttccccgactaaagggataaagcccagcgatttataaaacgtatgggctttttcattcagcgcctcgacaaaaagaccgtgaatacctaccgctaaagaggctgaccagacgactttcatggcatgagcaaccagtgttgctccccatccctgcccctgtaatgaacgatcaattgccagacgcccaagagtaacgctgggaatatttttgtagggaatttttttctgtttcgatttcgagggcaatgcggctcgttcaaaacaactgccgcataatgtgtaatatcccagcacctgacgttctggagtgttgcgacaaaggatatacgctcgcagaattttgttgcgatgttgacgaacgagatgtgtcgtcagaaagagatttaacgcttcctcgccgcagtcgaatcgctgtagatcataatctgcatcatcggtcagaatctctatcgtcagatcatccataaattattacattccctgaagacgttttgccgcacgttttagcttttcacctggtgacggtggattactcagcgcatccatcacccgcgtccaggattcctcattgaggatcacccgccgatgctgttcaatcacttccgcagcccgctgcgaagcgctgttcaacataaattggctgacggactgattagatatcgctgccgcttcctcaatcatacttttgtcatcgtcagttaaacgcagatcgatacgctgctttttaacagcagacatgtgaactctcctgctccgtataatatgtacggtatgtcaccgtacattaagcatatcctggattgtttaatctttctacaaccatttcgacaaacacaaaaaaacccgatggcagttcagcgcatcgggcattttcatttatctatctgttacttcgcatcggttgccgtgccgttggcgtgccagtcaaacacaccgaactcaaagcctttcagatcgcctttctcatcccaggtcagcggtcccattacggtatccacggagttcgctttcaggtatttggcgatttcagccggatcgtcagactgattcaggcccgcctgcaaagattgcagcgcggcgtangtggtccaaacgaatgcgccgcttgggtcctgttttttcgctttgatcgcatcaacaatgggtttgttcgccggaacctgatcgtagttcttcggcttggtcaccagcagcccttccgctgattcgcccgcaatgttagacagcgagacgttagccacgccttccggccccataaactgagttttcaaccctgccgcgcgtgcctgacgcaggatttgccccatttccgggtgataaccgccgtagtaaacgaagtcgatattctcttttttcagacgcgccaccagcgttgagaaatctttttccccggcggtgataccatcaaagaacaccacgttagcattgcctttcttcaggccgtcctgcaccgctcgtgccagaccttcgccgtattgctgtttgtcgtgaacgatagcaatacgctgcggtttcactttctcaagaatatatttcgccgccgtcggcccctggtcggagtccaggccggtggtgcgcaggatcagctgatagccacgggcggtcagctccggcgcggttgccgctggggtgatcattaaaatgccttcgtcttcgtagatgtcagacgcaggctgcgttgatgaagaacagaggtgaccaatcacgtatttaatgccgtcgttaacgactttgttcgccaccgcaaccgcctgtttcgggtcacaggcatcgtcatattttacgatttgcagtttgttgcctttaatgccgcctttagcgttgatatccgcaaccgcctgctctgcgccggtaaactcctggtcaccgtactgcgcaaccggaccggacattgcgcccacgaccgcgactttaatatcttctgccagagccatattgctgaatgccagcgcgatacatcctgccagtaacgctttaccctttatgttcatcctgagaatccccattcttctggttattacgtgtgttgtgatgttgttgttcagcactttatttcgttttatgcatgactacccgtgctttagcagcatactctgctaaaacatacccgatttttatgatattggaatagctattttgacagtttattaacaatctgcgtggggattggcgttttgccggaggggaaattgattattgtagaggcccaaaaaacaaaaaccccggactcgcatccagggttctctgcttaatagcggaaattacgcttctatagcagcgcgcagttttttcatcgcgttcttttccagctggcgcacacgctcagcggaaacaccgtaacggtcagccagttcctgcaacgtggacttgttgtcttcgtccagccagcgcgcacggatgatgtcctggctgcgttcgtccagaccctgcatcgcgtcggtcagacggtttgctgcctgctcttcccagttatcatcttcaatgccgtcggcaaagttagatgatttatcctgcagatagagcaccggtgccatcggttggctgtcggaatcgtcgtcggaagacaggtcaaaggtcatgtcctgtgccgccatacgtgattccatctcacgtacgtctttgctggttacgcccagttcacgggccaccatttcgacttcatcctggttaaaccagcccagacgctgcttggttttacgcaggttgaagaacagtttgcgctgcgctttggtggtcgcaactttgacgatacgccagttacgcagaacgtattcgtggatctctgctttgatccagtggacggcgaaggagaccaggcgcacacccacttccgggttaaaacggcgcactgctttcatcaggccgatgttaccttcctgaatcaaatccgcctgtggcaggccatagcccgcataattacgagcaatatgaacaacaaaccgcaggtgagacaggatcagcgttttagctgcttccagatcgccatggtaatgcagcttttcagccagcgcccgctcctcgtcagccgacaacatcggccacgcgttagctgcccggatgtaggaatccaggttgccaactggggctaaagctaaactttgcattttgtcagtcattcaaatcctctcaatcgatatcttctggcgcttcagtggtagcaacaactgtgccagagcttaagagcaacgaggttatcattcactgttttatcagaccgtgattttatccacaagttcaatgcaggcttgtgaataaattacgcacaaaatgtgacatagagatgaaataccgggaagagacaacggggtctctttccctgctacggaacccattgcagggaaagagtataacacgcttttattattcaggcgtaaagtggcgtaaatgttgtaccgtggcaagccacgctgccacccagccaatcatcgagcataccagcagcaacagcaggcattcatcgaacgataaaccattgatatcaaacttcgttccgaaaacctgtgccacttccgcaaccgccgatgacaatcgcagtaccagaatttctgacaaaattaatgacaacaatgcgccagaaaaccccagcaatgcgccaccgtacaggaacgggcgcaggatgaaaccatccgttgcaccaatcagtttctgcacgttaatggagtcacgacgagcaaagatactcaggcgtacactgttaccgatgacgaggaacactgccgccaccatcaacacgccgatcatcgccgaaacgcgcccgaccagcccggtcaacgccgccagacgggcaaaccagctgtcatccatccgcacttcgtcaatgccgttaatctgcgtgatacgatcacgcagcgtattcagagactccgtcccctgaaagtcgagcttcgggatcaccaccgccactgccggaagcgggttttcttccagcatatccagcgcgccaccaaaaccagaccagttacggaactcgcccagtgcgtcttcacgagaaagatagttcactttctctacgccttgctcggcctgcaactgtgccaccacgcccgcagcggcgtcatcgtccagcgttttttgcagataaacagtgatttgcggtgacggataatactgcgtcgccgcctggttaacgtttttgtacaccatataacagacgctgggcagcgtcagggagatggcgataaccatcaccgttaaaaatgtggcgaacggtttgcttttcagatcctgcaatgcgccgtggaaggcatagcgcacctgttcgttgaaaacgttggttttgcgatttaccggttttggcgaggatttcgcgcgtttcggtgcgttacgaccgccgtcgcctgagccgccgaccgatttacggaagcgatcaagacgcccgccaaactgccgaatatgattgattgcatcgcgcttattcatggcccacgcctccatgcaagtgaccatcgctcagggtgagcatgcgataggaacgccgtgaaatcaggttgatgtcgtgcgttgccatcaatacggttacccctacgcggttaaactcttcaaacagacgtagaatcccttccgacaacgcgtcgtccaggttaccagtcggttcgtccgccagcagtaccgcgggcttgttcaccaccgcgcgggcaatgccaacacgctgttgttcaccgccagaaagctgaatagggaagttcttcgctttgtccagtagcccgactttatccagtgccgccgacacccggcggcgaatatcgtcaccgctggcaccggcgataatcagcgggatcgccacgttatcgtagacagtacggtccatcagtagatggtgatcctggaaaatcatgccaatctggcggcgcagaaacggaacttcacggtttttcagacgcgtgatgtcatggccgctaaaccagattttcccggcgctgggccgctcaatcccacagatcagcttcaggagggtacttttccctgcgccggaatgaccggtcagaaacgccatctcacccggctgcatatggaacgtaacgccctgcagcgcctgtctcccaccgagataagccttgctgacatgttcaaagcgaatcattgttaatcctctcgggcaaaaagtgcctctataaagtcgtccgccttaaacggacgcaaatcctcaatacgttcgccgacaccaatgtagcggatagggataccaaactggtcagccaccgagaaaattaccccgcctttcgccgtgccgtccagtttcgttagcgtgatgccggttaagccaacggcttcatggaacagtttggcctggcttaccgcgttctgcccggtgctggcatcgatagtcagcataacttcatgcggcgcttcaacgtcgagtttcttcatcacgcggacgattttcttcaactcttccatcaggtgcgatttgttctgcaggcgtccggcggtatcggcaatcaggacgtcgatattacgcgctttagccgcctgaatggcgtcgaagataacagaggcggaannnnnnncggtatgctgggcaatcaccggaatattgttgcgctgcccccagacctgaagctgttcaaccgctgctgcacggaaagtatcgcccgccgccagcatcaccgatttaccctgctgctcaaactgacgtgccagcttaccaatcgtcgtggttttacccacaccgttgacgcccaccatcaggatcacgaacggcgttttaccttcaacattcagcggctcatcgactttcgccagaatctcacccatctcttctttcagcaggccatagagcgcctcggcatcacgaagctgcttgcgggatgcgccttccgtcagattggtgataattttacgtgtggtttccacgcccacatcggcgatcaaaagctgctcttccagctcctcaaacagatcatcgtcgatttttttaccgcggaacaggctgataaatccggaaccgagattttctttggtttttaacaggctgcgtttcaggcgcgcgaaaaaaccttctttggtcggtttttcctgctcctgagcgatttcttccaccggctgctcttcttctgccggaggaaccaccatcaccgcctcttctgctgcttcggcagccagcgcctgtgcttccagctcttcgtcggtgatttcttctttagccgcttcttcttccgccgcttcgacaatctctacggtttccgcttcagcctgccactcttctggcgaaacctcttcggcgttgacgtcttccggcaacggcagctcttcacgttcgatagccactggctccggcgtttcttctacgaccggttccggttgtgcaacgacttccgcttcaggctgcgctttttcattttcagcaacctgttcagtgacttccacaacgtcggcagcaaaagtttccgcctcggcctcagtatgcgcctgcggctgctcttcgacggcttgttcagaagccttcacaggctcttgcgcctgaacgatttcttctacaaccgtttgttcattctgaacttctgtctctttttccggggtctgctctttttgaccaaagcccagccaggaaaaaaagccacgttttttttctttcgccatttgcgactacactcctcgctgttgcttcatggcacagcgttaacgctatgtacatagcagctaaaaaaatgatgaaatagtctatcacttaacttaattcacatcaccgcctgcaagtatgtgttatctggcggattgagcaatttatcatgaaaaaaccgaatcattccggcagcggccaaatccgcattattggcgggcagtggcgaggccgtaaactcccggttcctgatagcccaggtctgcgccccaccaccgaccgcgtacgcgaaacgttgtttaactggctggctccggtcattgttgacgcccaatgtctggattgcttcgccgggagcggcgcgctggggctggaagcgttatcgcgctacgctgcgggggccacgttaattgagatggatcgtgcagtttctcagcagttaattaagaatctggcgacactaaaagcaggcaatgcacgcgtggtgaacagcaacgcaatgtcattcctggcgcaaaaaggcacaccgcataatatcgtgtttgtcgatccaccgttccgccgtggtttgttagaagagacgataaatttactggaagataacggctggctggctgacgaaaccctgatttatgtcgaaagcgaagtcgaaaacggtctgcccaccgttccggcaaactggtcgttacatcgggaaaaagtggcgggtcaggtggcttatcggctgtatcaacgcgaagcacaaggagaaagtgatgctgattaatattggtcgtttgttaatgctctgtgtttggggatttttaatcctcaacctggtgcatcccttcccgcgcccgctgaatattttcgttaacgtggcgctgatttttaccgtgctgatgcatggtatgcaactggcgctattgaaatccactttaccgaaagatggcccgcagatgaccaccgccgaaaaggtgcggattttccttttcggcgtgtttgaactgctggtctggcagaagaaatttaaagttaaaaaataaccttattgttcgccaacaaagctaacaaagcgcgttcctttatagctcagcgtacctttatcgcccactgtcagggcgtggtactgctgggcgtcgaggcgaaacgtctgctccattcctccgctttgcggtttgaagcttgcctcatagcgcatactggtgcctgccggagtcacttcctgctggcgcgaacggcgatcgttaatcggtttttcccgcttgttgctcaccaacaccagcttttgctggagtggtgccatatcattatcagctttttcccgtcgctgttgcataaaacgaaacgatgcggcgacgatgattaagccaatgataacaataaagaaaagaggtggtttgctcatctttatccctcatcggaaaatgcggaaataagcataccctgccagttatggtgttgtcatccgtccaccctcgccactaaactggaagcaagaccgtaggcattccgcttacgaaaaaataacgaattcaaggaactaagatgctttggtcgtttatcgctgcctgtctttccgcatggctatctgtggatgcatcgtatcgtgggccaacctggcaacgctgggtgtttaaaccgttaacccttcttctcctgctgttactggcctggcaagcgccgatgttcgacgccattagctatctggtgctggcagggctgtgcgcctcactgctgggcgatgcgctaaccctgttgccacgtcaacgtctgatgtacgccatcggcgcgtttttcctctcgcacctgctgtacaccatctatttcgccagtcagatgacgctctctttcttctggcctctgccactggtgttgctggttctgggtgcgctgttactggcgattatctggacgcggctggaagagtatcgttggcctatctgcacgtttatcggcatgacgctggtgatggtgtggctggcaggtgaactgtggttcttccgtccgaccgctccggcactctctgcgtttgtcggcgcttcgttgctgtttatcagtaactttgtctggctgggtagtcactatcgccgacgcttccgtgcggacaacgcgattgctgcggcctgctactttgccggtcacttcctcatcgtccgctcgctgtatctctgataaaacttgactctggagtcgactccagagtgtatccttcggttaatgagaaaaaacttaaccggaggatgccatgtcgactcctgacaatcacggcaagaaagcccctcaatttgctgcgttcaaaccgctaaccacggtacagaacgccaacgactgttgctgcgacggcgcatgttccagcacgccaactctctctgaaaacgtctccggcacccgctatagctggaaagtcagcggcatggactgcgccgcctgtgcgcgcaaggtagaaaatgccgtgcgccagcttgcaggcgtgaatcaggtacaggtgttgttcgccaccgaaaaactggtggttgatgccgacaatgacatccgtgcacaagttgaatctgcggtgcaaaaagcgggctattccctgcgcgatgagcaggccgtcgacgagccacaagcatcgcgcctgaaagagaatctgccgctgattacgcttatcgtgatgatggcaatcagctggggtttggagcaatttaatcatccgttcgggcaactggcgtttatcgcgaccacgctggttgggctgtacccgattgctcgtcaggcattacggctgatcaaatccggctgctacttcgccattgaaaccttaatgagcgtagccgctattggtgcactgtttattggcgcaacggctgaagctgcgatggtgttgctgctgtttttgattggtgaacgactggaaggctgggncgccagccncgcgcgtcaaggggtcagcgcgttaatggcgctgaaaccagaaaccgccacgcgcctgcgtaacggtgagcgggaagaggtggcgattaacagcctgcgccctggcgatgtgattgaagtcgccgcaggtggacgtttgcctgccgacggtaaactgctctcaccgtttgccagttttgatgaaagctccctgaccggcgaatctattccggtggagcgcgcaacgggcgataaagttcctgcaggagccaccagcgtagaccgtctggtaacgctggaagtgctgtcagaaccgggtgccagcgccattgaccggattctgaaactgatcgaagaagccgaagagcgtcgcgcacccattgagcggtttatcgaccgtttcagccgtatttacacgcccgcgattatggccgtcgctctgctggtgacgctggtgccaccgctgctgtttgccaccagctggcaggagtggatttataaagggctgacgctgctgctgattggctgcccgtgtgcgttagttatctcaacgcctgcggcgattacctccgggctggcggcggcagcgcgtcgtggggcgttgattaaaggtggagcggcgctggaacagctgggtcgtgttacccaggtggcgtttgataaaaccggtacgctgaccgtcggtaaaccgcgcgttaccgcgattcatccggcaacgggtattagtgaatctgaactgctgacactggcggcggcggtcgagcaaggcgcgacgcatccactggcgcaggccatcgtgcgcgaagcacaggttgctgcactcgccattcccgccgccgaatcacagcgggcgctggtcgggtctggcattgaagcgcaggttaacggtgagcgcgtgttgatatgcgctgccgggaaacatcccgctgatgcatttgctggtttgattaatgaactggaaagcgccgggcaaacggttgtgctggtagtacgtaatgatgacgtgctgggtatcattgcattgcaggataccctgcgcgccgatgctgcaactgccatcagtgaactgaacgcgctgggcgtcaaaggggtgatcctcaccggcgataatccacgcgcagcggcggcaattgccggggagctggggctggagtttaaagcgggcctgttgccggaagataaagtcaaagcggtgaccgagctgaatcaacatgcgccgctggcgatggtcggtgacggtattaacgacgcgccagcgatgaaagctgccgccatcgggattgcaatgggcagcggcacagacgtggcgctggaaaccgccgacgcagcattaacccataaccacctgcgcggtctggtgcaaatgattgaactggcacgcgccactcacgccaatatccgccagaacatcactattgcgctggggctgaaagggatcttcctcgtcaccacgctgttagggatgaccggactatggctggcagtgctggcagatacgggtgcgacggtgctggtgacagcgaatgcgttaagattgttgcgcaggagataaggcaaaccgatcgcaacattgagcgcgatcggtcccctcgctcctctggggagagggttagggtgaggggaaaaggcggcatcgaagccaatctgcccccgtcaaccgcctttacgaatcaaataacgataaggcagtccatccgtctctttggcaaccagttcgtgttccataaaggtacaaaacccagggatatcgcgggtcgtcgccggatcgtcagcaataatcagcaatgtttcacctggctgcatattgcgcactgttttgcgcaccatcatgactggttccgggcagcgcaggccaagtgcgtcgagtgtgtggtcagggctggaaaagagatcggtcattttcttctcatcacataaaaaaacggcgctagtttacgccctgtgagtccgtaagcaaaccaggttaacgattgcgtgaaaattaaccattgcattgtcaacgtaaagcagtatcatgcggcggctcgaaaaaagggtaagcacgttattatgttaaggtaacagacgtgtcgtacgtattgggttccctcaccccaatggttaatcaaaaaggtacaatatgaacgttttctcgcaaactcaacgctataaggcgttgttctggttatcgttatttcatctgctggtgatcacctccagtaactatctggttcagcttcccgtctccatttttggtttccataccacctggggcgcgtttagctttccgtttatctttctcgctaccgacctgaccgtacgtatttttggcgcaccgctggcccgtcgtatcatctttgcggtgatgatcccggcattgctgatctcctacgtcatctcgtcgctattctatatgggttcatggcagggattcggcgcactcgcccacttcaacctgtttgtcgcccgtatcgccaccgccagtttcatggcctacgcgctgggacagatcctcgacgtgcacgtttttaaccgcctgcgtcagagtcgccgctggtggctggcaccgacagcgtccacactgttcggtaacgtcagcgacacgctggcctttttcttcattgccttctggcgtagcccggatgcctttatggctgaacactggatggaaatcgcgctggtcgattactgtttcaaagtgttaatcagtatcgttttcttcctgccaatgtatggcgtattactcaatatgctgttgaaaagactggcagataaatccgaaatcaacgctttgcaggcgagttaaaggttcgttatcagagttgtgataagatggatgaatgagccgttatggccgtttatcgaaaggaagaagtcaatgcgcaatctggttaaatatgtcggaattggcctgctggttatggggcttgcggcctgtgatgataaagacactaacgctacggcgcagggttcggtcgcggaaagtaacgctaccgggaatcccgtcaacctgcttgatggcaagttaagtttctcgctgccagcggatatgaccgaccagagcggtaagctgggaacgcaggccaataacatgcatgtctggtccgacgccaccgggcagaaagcagtcatcgtcatcatgggcgatgatccgaaagaagatctggcggtgctggcgaagcgtctggaagatcagcaacgtagccgcgatccacagctgcaagtggtaaccaataaagccattgagctgaaaggtcacaaaatgcagcagttagacagtattatctccgcgaaaggccagacggcgtactcttccgttattctgggtaacgtgggtaatcaactgctgaccatgcaaattactctgccagctgacgatcagcaaaaagcgcagaccaccgcagaaaacatcattaatacgctggttattcagtaagttttaagatgatgaggcggcctcagggacgtgttccggaggccgtttttttaatcgccacgtcagtaataacgcgattgcgaccagtcccgccgccgccagataaatcaccggtacgcccgcccaactcatcaccagcccagccagtggtccggtcacgccaagcgataaatccataaatacggtgtaggttgccagcgccgccccctgattttgctgcggaaccgcttttaccgccactacacccaatgccgggaacaccagcgaaaacccggcccccgccagtaagacgccgattttcgccatccacggcatagtcgccacgccaaccagtagcaggccgattatctcaacgctaaagcaaatcatcgctacgtttaagccgccgatacggttaatgccgttagggaataacaaacgcgtaccgacaaacgcacagctaaacagcgtcagcgcgaaagccgcaccgtcccaacctttaacgtcataaaacagcgtgataaaggtggcgatgacgccaaatccggcggaagccagtgccagcgccataccgtacagccagacgcgcccaagcaccgcgcgaaacggcagcggtttgcctttactggcttttaccgtcggacgcgggatcgccaacaaaatggccaccagcgccacgcccataataattaacgctaacgcctgcaagccgccccagtgataaaacacgacgcctaacggcgcacccatcgccatcgccccgtaagtgacaatgccgttccacgaaatcacccgcccgatatgcagcgagccaaccacgccaacaccccacagggtcgatcccgttccggcaaaactttgcccaatcccaaggatgacgcgtcccaggcaaagtaataacaggctgatgacgggcagactggcggttaatcctgccgtcagatatcccagaccgctcaaaaagcagccgcataaaccgaagacgacaatctttttggggcccagcaaatcggcgtaacgtccggcatgaggacggctcagcaaggtggcgaaatattgcaggctgataaccaatcctgcccagaaagcgctaaagcccatcacatcatggacatagcccggtaatacagcgagcggcaacccgatggtgaggtagctggcgaagttaaacatgacaatggagacaatgcgcaaattcaggcgcaatccgtttagcgcgggttcggctacgggttcgggcatgaggatcaccacatttttacaacagtgtttcatttttaccacgtgctgacgtgaaaatcagcagtaagaatcagaatattgccgtcgtgactcccgctacacttaatacaaaaagtcacaaggaagccccaatggaaacccctcaacccgataaaacgggcatgcacattctgctcaagctggcctcgctggtagtgatcctcgcgggcattcacgcagcggcagatatcattgtgcagctgttactggcgctgttttttgccatcgtcctcaacccgctcgtcacctggtttattcgtcggggagtacaacgccccgttgccattacgattgtagtggtggtgatgctgatcgcactaaccgcgctggtcggcgtactggcggcatcgtttaacgaatttatctctatgctgccgaagtttaataaggagctgacgcgcaaactttttaaattgcaggagatgttgccttttcttaatttgcatatgtcgccggagcgaatgctgcagcggatggactcggaaaaagtggttaccttcaccacagcgctaatgaccgggctttccggggcaatggcgagcgtgcttttgctggtgatgaccgtagtttttatgctgtttgaagtgcgccacgtcccttacaaaatgcgttttgcgctgaataacccacagattcacatcgcgggattacaccgcgcacttaaaggcgtttcgcattatctggcgttaaagacgctactcagtttatggacgggtgtcatcgtctggctggggctggagctgatgggggtacagtttgcgctgatgtgggcagtactggcgtttttgcttaactacgtgcccaatatcggcgcggtaatttccgccgtaccgccaatgattcaggtgctgctgtttaatggtgtttacgaatgtattctggtcggcgcattgtttttagtggtccatatggtcatcggcaatattttagaaccacggatgatgggccatcgcctggggatgtccaccatggtggtatttctttcattgttaatttggggatggctgctcggcccggtagggatgctactttcggtgccattaaccagcgtgtgtaaaatctggatggaaacgacgaaaggcggcagcaaactggcgattttactggggccgggcagaccgaaaagtcggttaccgggttaatagcacctcctgagcaggcaatggccaccgtttatctaacagtggccatttgatttgaggaaatgatgaaacattattcagaaaattnanntannaaaaccattccttaagtcaaatatatataaacgccgaatagcgattaaatccttctcaaagaatgcactgataacattgtgttatttttattgcctcatttttctcactcacttatagttggtccctgctggcagtaatttagtcatttcagagatttttactctgatgtgcacttactgacttatctcacaagtaattttttctctaaataaagaatagtgatgccagcaattacagttaaaacttgctttactcgtaaaaacaatactttaatggggttctaatgagacattacatgaaatggtttgcggctattgctgttgtgggtgctttagcaggttgcgcgcgtactgcgccaattgatcaggttcactcaaccgtcagcgctggtcatacccaggaacaagtgaaaaaagcgattctgaaagctggcgttgaacgcaaatggattatgtccgaagccggacaaggcataattaaagcacgtcaacagtcacgcgatcattcagcggaaatacgcattaactacacggcatccagctacgatatcaattatgaaaatagccagaacctacaagcgtcaggcggacaaattcataaaaactacaatcgctgggtccgcaatctcgacaaagatattcaactgaatttgtcagcgggmgcagatttataattcttcctaaagtcgggccgttgcggtccgataataatttaattccctcttaacaggttgtgcccaacatgtacgaacaggattctcttagcgcactggatgcgattaccgaagctcaacgcattgcctttgcccctatgctttttcaaacagcactctgcctacgtaatgcgggtgtactttcatatctggatcggcaaggcaaacatggcgcaacgctggctgatatcaccgaacatagccatatcaacgaatatgctaccagcgttctgttagatatgggcttaagcgggcgaattattacctgtaaagagggaatttattacctggcgaaaatcggtcattacctcctgcatgacactatgactcgcgtgaatatggatttcacccaggatgtctgttaccaggggctcttcttcctcgccgattcactcaatgaaggaaaaccttccgggttaaaagtatttggcgactggtcgacgatatatccggcactttcgcaattaccagacgccgctcgtgaaagctggtttgcgtttgatcattactattcagatggcgcatttaacgccgcactgccttatgtattcgccaacaaccccacaacattgtacgatgtaggcggcaatacgggtaagtgggctttgcgttgctgcaaatacaatgaaaacatcgccgttacgttattagatctgccacaacaaatcgtactagcgaaagaaaatatcgcgaatgcaggtttttctgatcgcatagatttccatgcggtggatatgctaagcgatgccccattaccgggcgaggctgatatctggtggatgagccaatttttagactgtttttcacccgaacaaataattagcatactcagcaaaattgccagcgtaatgaagcctggcgcaaaagtttgcatcatggagttgttctgggatgcgcagcggtttgaagcagcatcgtttagcctgaacgcgtcctcactttattttacctgcatggcaaacggtaacagccgtttctatagtgcagagaaattttacgactatctgaataaagcaggattccaggtagcagagcgccacgataatttaggcgttgggcatacacttttgatatgccaaaagaaataatcgtcacttaataattttggtttaccgcgggcgcgcgttgatgaaatttgcattaaacattctcgactggcaggcaagagcgcctggacttagtgaaacgctgcaatggcaggagtggtcacgtcagcctcaggcaattgacccgacagcaccgttggcaaaattaagtgaactgccaatgatgaccgcccgccgcctcagctccgggagcaaactggctgttgaatgcggtctggcaatgctacgccgccatcaaccagacgccgttttgtataccagtcgtcatggcgaactggagcgcaattaccgcattgttcatgcactggcaaccgaacaggcgctttctccgacggacttcgcgctctccgtacacaactcttccgtgggtaacctgaccattgcggccaaacagccgatcgtttcgtcatcgctttcggctggtcgcgatagtttccagcaaggtttgtgtgaagtgcttagcctgctacaagcgggataccagcgcgtgctgatggtcgattttgacggtttcctgcccgagttttatcacccacaactgccatcagaaatgccgacctggccgtacgccgtcgcgctggtgattgaagctggcgatgactggcaatgtgaaacgcagtcagccattgcgggcaatgaaacaacactgccgcaaagcatgttgtttttacagcactatttacaaaatgtagacacattttcactgcctggcgagcgcgtgcaatggcgctggagccacagatgagtaagctgatgtcacgtctggagtggacctggcgactggtcatgaccgggttatgttttgccctgtttggtctcggcggcctgctgctttctgtcgtgtggtttaacatattgttagttttggtgtgggatacttcccgccgccgtcgtttggcgcgtcgcagcattgccgccagttttcgcctgtttttaactgtcgcgaaagggcttggcgtactggattatcgtattgatggcgctgaaatcttacatcaggaacgcggttgcctcgtcgtagccaatcatcccacgctgatcgattacgtgctgctggcgtcagtcatgccagaaactgactgcctggtgaaaagcgcgctgttaaannnnccttttcttggcggcgtcgtgcgggcgacagattatttaatcaacagcgaagctgaaactctgttaccccgctgccaacagcgactggcacagggtgacactatcctgattttccccgaaggcacacgaacgaagcccggtgaaaaaatgacgctgcagnnnnnnnnnncgaatattgccgtgcgctgcgccagcgatttacgcatcgtgacaatcggctgtagcgagcatctgctggataaacaaagtaaatggtatgacgttccacctgaccggccgttttttacggttgcagtccatggtcgggttgaaatcaataaattttacgatgcaacttcacaagaaccggcgctggcagcaaggcagttaaaccggcatcttttgcttcaattacaacaaggttgtttacctctctcaggaataaataatgcaagcgctttatctggaaattaaaaacctcatcatcagcaccctcaatctggacgagttgacgcctgatgatatcgataccgacgcgccgctgtttggcgacggtttagggctggactctatcgatgccctggaactgggactggcagtaaaaaatgagtacggcatcgtgctctctgcggaaagcgaagagatgcgtcagcactttttctccgtcgccactctggcctctttcattgctgcgcaacgtgcctgaggaaagccatcatgacagaacaacaaacngtctatcaggaagtctcagccctgctggttaagctgtttgaaatcgatccgcaggacatcaaacctgaagcgcgcctgtacgaagatctggaactggacagcatcgacgccgttgacatgattgtgcacctgcaaaagaaaaccggtaagaaaatcaagccggaagagtttaaagcagtgcgtacagtccaggatgtcgtcgaggctgtagaacgcctgctacaagaagcctgatctgatgtcgggcattcgctcgctaccgatgattaagctgctgactggattattgctgctcgcctggccgtttgtgatttggtttggcttagcgcataacggcctgcactggctgttaccgctaatggcgttgctgcttttgttgcgtctgcgccagacccgtcgccaggcggggcctttacaagccgtcacgcaactcgtcgctgtcgtgggcatcgcattatgtgtcgccagctttatgttgaaaacgcaccagctactgctgttttacccggtagtggttaacgcggtcatgctggcggtttttggcggttcgctgtggtcggcaatgccgatagttgagcggctggcgcggttgcaggagccagacctcccggaaaagggcgtgcgctatacccgccacgtcacgcaaatctggtgcggctttttcatcattaacggtggaattgccctctttaccgcgctttatgccgatatgtcgttatggaccgcctggaacggcatgattgcttatttgttgatggggacgttaatggctggtgaatggctgctgcgccgtcaggtgatgaaaagagatcgcgcatgaagcagaccttaccgcttgcacgctggctgactgcgccacgccctgatgacacacccattgcgtggctgaacgaaagtacctggacgctgggcgatttgcgtcacgatgtcgcgcaacttatctgccgcttgcagcaacagccgggtgaacgctgggcgctgtgctttgagaacagctatctgtttatcgttgccctgctcgccacgctacacgccggaaaaacgccggtgcttccggggcataaccgtgttatccagcttaacgagcaacgtgaactttttgatggtgtgcttagcgacagcgaacttaactggcaaggttcattgctgttggtagcaagttctccacaaatcgcgacacaatccttcacctttgccgctatagcgccagaggcttttatcgagctgtttacctccggttccacgggacagccgaaacgggcgattaaacctgttcatttgctggatcgtgaagcagaactgctggctgaacgattaggcgcacgtctggcgggttgtcgtgtcgtcggttccgtattgccgcagcatttgtacggcctgacttttcgcgttttcctgcccatggcgttgggattaccgctgcacgccgccatgctctggtatgtcgaacagtttgccgcgttgagtcatcagcatcgctatatcttcatcagcagcccggcatttttgaagcgcctggatacccagctttctccgccacccgttcaggtgcttctctctgctggcggtgagctgccgtggcaggatgtacaacataccgcgagctggctgcgcgtctggcctgatgaaatctacggcagcacggaaactggcgtcatcgcctggcgctaccgcgaacaagagcaacgccgctggctacccctcccaggtatgcagttccaggccgaaggcgatgcctttcgcctcttttcaccgctgatagcggaagataacggcatgttactcgacgatatcttacagtttagcgaagatggtcagttccatctgatggggcgtcgtgggcgcatcgttaagattgaagaaaaacgtatttcactccaggaagtagaacaacgtctactggcgctggacggcattcgcgaggcggcggcagttcccgttacgcgcggcgggcgtcagagcataggcgttttgctggtgctggatgacgaagctcatctgcaatggcagaacggcggcgggcatagccaggaaatgncctggcggcgtttactgcgcccgacgctggagccagttgctattccgcgttactggcgcgttattgatgaaatgccagtaaacagtatgaacaagcgtgtctatgcgcaattacaggagttatttcatgaagccccatgaaatcgagcgccatcaggcacaaacgaatcaccttgaaattgttctgcatctcagggcggatctgttctggtttcgcggtcattttgccgtgcaaccattactcccaggagttgcgcaaatcgactgggcgatgagctacgcgctcaatctgctcgcgcctggctggcgttttcactccattcagaacataaaattccagtctccgttgctgccggaaaaccgcgtcacgctcgcgcttaactggcaggaagaacgccagattctgagctttagctatcagcgtcacgacggtgacgcccgccacaccgccagtagcgggaagatccgcctatgtcggtaaacttttctccctgcgtgttgataccctgctacaaccacggcgcgatgatgccgggcgtgctggcgcgtcttaagccatttaatctgccctgtattgtggtggatgacggcagcgatgccaccacacaacagcaactggacagtctgcttgccgaacagcctggcgtgaccttaattcgcctggcagaaaacgcaggcaaaggcgcggcggtgatgcgtggcttacaggcagcggcagacgcagggttcagccatgcggtgcaggtggatgctgacggtcagcacgcgattgaagatatccctaaactgctggctctcgctgaacaacaacctgcggcactgatntccggccagccaatttacgatgactccatcccccgctcacggctttacgggcgctgggtcacccacgtctgggtatggatcgaaacgctctccctgcaactgaaagacagcatgtgcggttttcgcgtttatccggttgcgccaacgctgcaactggcaaaacacgccaccatcggcaagcggatggatttcgacaccgaagtgatggtgcgcctctactggcagggaaataccagctatttcgtgccgacccgcgtcacctatccactggacgggctttcgcattttgatgccctgaaagataacgtccgcatctcgctcatgcacacgcgtctgtttttcggcatgttgccgcgtattccttcactgctgatgcgccgctcttcctgccactgggcgcggcagagtgaagtgaaaggattatggggaatgcgcctgatgctgctggtctggcgtctgctgggaagaacggcgtttagcgcgctgctttacccggtggtgggcgtctactggctcactgcttctcgtgcgcgcaaagcgtcgcaagactggctcgcccgtgtacgacagcatcaaccacaggcggcaaaactcaacagctatcagcactttctacgtttcggtaatgccatgctcgacaaaatcgccagctggcgcggcgagctacaactagggcgtgatgtgctgtttgcgccaggcgcagaagcagcgcttgacgtccgcgatccgcgcggcaaattgctgctggcctcgcatcttggcgatgtggaagtgtgccgggcgctggcaaaaattcagggctacaaaaccattaacgcgctggtgtttagcgaaaacgcccaacgctttaaacagataatgcaggagatggctcctcaggcaggcattaacctgatgccggtaacagatatcggcccagaaaccgccatcctgctgaaagagaagctggataacggcgaatgggtggcgattgtcggtgaccgcatcgccgtcaacccgcaacgcggcggcgactggcgcgtctgctggagttcgtttatgggccagcctgcgcctttcccacaggggccgtttattctcgcctctattttgcgctgcccggtgaatctgattttcgccctgcgccagcacggcaagctgcatattcactgcgaaagctttgccgacccactgcagctgccgcgcggcgaacgccaacaggcgctgcaaaacgctatcgatcattacgccgcgcgtctggaacattacgcgctccagtcgcctctcgactggtttaattttttcgatttctggcaactgccggaaattcaggacaaggagtaaagggtgctgaacgatccccgatttaccgcagaagtcgagctgaccattccctttcacgacgtcgatatgatgggcgtggcctggcacggtaactattttcgctactttgaagtggctcgcgaggcgctgctcaaccagttcaattacggctatcggcaaatgaaagagtccggttatttgtggccagtggtcgatgcgcgggtgaaatatcgccacgccctcacctttgagcaacgcatccgcgtgcgtgcgcatatcgaagagttcgaaaaccgtctgcggattggctatcagattttcgatgccgaaacgggcaaacgcgccaccaccggatacaccattcaggtcgcggtcgacgagcaaagtcgcgaactgtgctttgtcagccccgatattctgtttgaacgcatgggagtcaaaccatgaaatttttaccgctgctggcgctgctgattagcccgtttgtgagcgccctgaccctggacgatcttcagcaacgctttaccgaacaaccggtgatccgcgcccatttcgatcaaacccggacgattaaagatctgccgcagccgctgcgatctcagggccagatgttgatcgcccgcgaccaggggctgttgtgggatcaaacctcaccgttccccatgcaactattactggacgataaacgcatggtgcaggtgatcaacggtcagccgccgcaaatcatcacggcagaaaacaacccgcagatgttccagtttaaccacctgctgcgcgcgttgttccaggccgatcgcaaagtgctggaacaaaacttccgcgtcgaatttgctgacaaaggcgaaggccgctggacgctgcgcctgacgccgaccaccacgccgctggataaaattttcaacaccatcgatctcgccgggaaaacctatctggagagcattcaacttaatgataaacagggcgatcgcaccgatattgctcttacccaacatcaactgacgccagcgcaactgaccgatgacgaacgccaacgttttgccgcccagtaaacgccccgcgctgttatgggggctagtctgcctggtcatggcggtggcgttgctgatcctgctgccgcaatcacggctgaacagtagcgtgctggctatgttacccaaacagacgatgggcgatattcctccggcgctgaatgacggctttatgcagcgtcttgaccgccaactggtgtggctggtcagccccggtaaagaggctaatcctttggtcgctcaggagtggctgacgctgctgcaaaaatccgctgcgctcggcgacgttaaagggccaatggatgccgccagccagcaggcgtggggagcgtttttctggcagcatcgcaacggcctgattgaccccaacacccgcgcccgcctgcaaaacggcggcgaagcgcaggcacagtggatcctctcccagctttattccgcattctccggcgtaagcggcaaggagctgcaaaacgatccgctgatgttaatgcgcggctcgcagctggcaatggcgaaaaacggccagcgtttgcggctgatggacggttggctggtgacgcaggatccccagggcaactactggtatctgctgcacggcgaactggcgggatcgtcgtttgatatgcagcaaacccaccagctgatcacgaccctgaatacgctggaaaaggatctgaaaacgcgttacccgcaggcacagttgctctcgcgcggcacggtgttttacagcgattacgccagccaacaggcgaagcaggatatctccaccctgggcgtggctacgctgctgggggtgatattgctgattgtggcggtgttccgctctttacgcccgttgctgctttgcgtgatttccatcggcatcggcgcgctggcgggaacggtcgccactttattgattttcggtgaattacacctgatgacgctggtgatgagcatgagcgttatcggcatttccgctgactacacgctctattatctcaccgagcggatggttcacggcaacgacgtttcgccgtggcaaagcctggcgaaagtacgcaatgccttgctactggcgctgctcaccaccgtggcggcgtatctgattatgatgctcgcccccttccccggcattcgccagatggcgatttttgccgccgtcgggttgancgcctcctgtctgaccgtcctgttctggcatccgtggctgtgccgtggcctgccggtgcgtccggttccggcgatggcgctgatgctacgctggctggcagcgtggcggcgtaataaaaaactgtcgctgggtctgcccgtcgcgctggcgctgttttcgctggcggggatgtcaatgctacgcgtcgatgacgatatctcgcagttacaggcgctaccgcagcatattctggcgcaggaaaaagccattaccgccctgaccgggcagagcgtcgatcaaaaatggtttgtggtttacggcgattcgccacagcaaacattgcggcgactggagaaatataccgcctcacttgagtatgcgaaaaaagaggggcttatcagcaactaccgcaccattccgctgaactcccttgcgcggcaggaggaagatttacaactgctgaaaacggcggccccgacagtaacaaaagcgctgcaaaatgccgggctgacggcagtgaacccggatctcaacgccatgccagtgaacgttgatgaatggctggcaagccccgccagtgaaggctggcgtctgctgtggctgacgctggaaaacggcgaaagcggcgtactggtgccggttgaaggggttaaaagtagcgcgttgatgcaggaaatcgccacatattacccttgcggcattgcctgggttgatcgcaaaagcacctttgatgaattgttcgcactttaccgctacgtcttaaccggcttgttgctggtggcgctggcantgattgcctgcggcgcagtggcccgtctcggctggcgcaaagggcttatcagcctggtgccttcggtgctttcgctgggctgtggtctggcggtgctggcgatgagcgggcaggcggtgaatctcttttcgctgctggcgctggtgctggtgcttggcatcggtatcaactacacgctgtttttcagtaatccgcgcggtacaccgttaacttcgctactggcgatcgcgctggcaatgctcaccaccttgctgacgctgggtatgctggtattcagcgccacccaggccatcagcagttttggcattgtgctggtgagcggtattttcaccgccttcctgctttcgccgctggctatgcccgataaaaagagaacaaaaaaatgatcaaatccacattctggcgagcgttcgccctgaccgctacgcttatcctcaccggctgtagccactcgcaaccagaacaggaaggccgcccgcaggcgtggctgcaacctggcacgcgcatcacgctgccggcaccagggatttcacccgcagtcaattcgcagcaactgttgaccggcagcttcaacggcaaaacccagtcgctgttagtgatgcttaacgccgacgatcagaaaatcacccttgccgggctgtcgtcggtcggcattcgcctgtttctggtgacctacgatgcgcaagggctacgcgccgagcaatccatcgtcgtcccacagttaccgcccgcaagtcaggtactggctgacgtgatgctcagccactggccgattagcgcctggcaaccgcaacttcccgcaggatggacacttcgcgacaacggtgacaaacgcgagctgcgtaacgccagcggcaaactggtcacggaaatcacctatctgaatcgcaagggcaaacgcgtgccaatcagcattgagcagcatgtctttaaataccacatcaccattcaatacttaggtgactgatatgatttatatttccgccgtcggcatgatcaacgccctgggaaataaccttgacgaaatcgcaaccaacctgactcgcggtgttgctcccggcatgcgccnncgcgcaggctggttgcaggggcatccgcaggcggtcctggctggcgtggatggcgagcttccgcttatcccggaaaaattcgctgcgcaccgctcgcgcaacaatcagatcctgctggcggcgctggcgcagatccagccgcaggttgatgacgccattgcgaaatatggccgcgagcgcattgcgattgtgcttggtaccagcacctccggcctgcatgaaggcgacacgcacgttaacctgcgcacccacgggcagccgagcaccacatggcactacgcgcaacaggaactcggcgatccgtcgcgttttctcagccactggctggcgctcgacggcccggcctataccctttcaaccgcctgctcttccagcgccagagcgataatcagcgggcgcaggcttatcgaagcggggctggtcgatgccgccattgtgggtggcgcagacaccctgagccggatgccgattaacggttttcacagcctcgaatcgctgtcgccaaccttatgtcagccgtttggtcgtgaccgcgcaggtatcaccattggtgaaggggcggggctaatgctgctgacccgggaaccgcagcccatcgcgttgctgggcgttggtgaatcgagcgacgcttaccatatttcagccccgcatccgcagggcgaaggagcgatccgcgctattaatcaggcgctgaccgatgcgcagcttacgccagatgacgtcggctatatcaacctgcacggcaccgccacacaactcaacgatcagattgaatcaatggtggttaacgccctgtttggcgaacgcgtaccgtgcagctccaccaaacatttgaccggacacacgctgggcgcagcgggcattaccgaggcggcaattagtatgttgattttacagcgtgatttaccgctgcccgctcaggacttcagcctgtcgccgcgcgatcccacgctgccaccgtgtggcattatcgaaaaaccgcagccgctggcacgtccggtgatcctgtccaattccttcgcctttggcggcaataacgccagcattctgctcgggagggtttcgtgagccactatttatcccccggcgcttatctgccccacgacgcgcccatgttactgctggaagacgtggtgagcgtcagcgatgacagcgcggtgtgccgcgtgacggtttcgcccagtggcgtactggcaccgtttctcgacccggacggcaatctccccggctggtttacccttgaactgatggcgcaaaccgtcggcgtctggtctggctggcatcgccaccagcagggcaaaaacagtattgagttagggatgatactgggcgcgcgtgaattgctttgcaccactggcattctgcccgcaggccagacgctgaccattaccgtcaaactgctgatgcaagacgatcgcttcggcagttttgagtgcagcatcaacgacggcgaggcgacgggccgcattaacaccttccagccgaccgcggaagaacttaccaccctgtttcaacaaggagcgtcctgatgagtcgttcagttctggttactggtgccagcaaaggcattggtcgcgccatcgcctgccaactggcggcagacggctttaacattggcgttcactatcaccgtgacgccacaggcgctcaggaaacgctgaatgccattgtcgccaatgggggtaacgggcgtttgctcagtttcgacgtcgcaaaccgcgaacagtgtcgggaagtgctggagcacgaaatcgcgcaacacggtgcctggtacggcgtggtcagtaacgccgggatcgcccgcgatgccgcttttccggctttaagcgatgacgactgggatgcggtgatccacaccaacctcgacagtttctacaacgtcattcagccgtgcattatgccgatgatcggcgcacgccagggtgggcgcatcatcacgctatcctcggtttccggcgtaatgggcaatcgcggccaggtgaattacagcgctgccaaagccggaattatcggcgcaacaaaagcgctggctatcgaactcgcgaagcgcaaaatcaccgtcaactgcatcgcgccggggcttattgataccgggatgatcgaaatggaagagagcgccctgaaagaggcaatgtcgatgatccccatgaaacgcatgggccaggcggaagaagttgccgggcttgccagctatttaatgtctgatattgcgggttacgtcacccgccaggttatttccatcaacggagggatgttatgacacgtcgcgtagtgattacaggaatgggcggcgtgactgcctttggtgaaaactggcaggacgtttctgcacgcttactggcatatgaaaatgcggtgcgcaaaatgccggagtggcaggtctacgatgggctgcacaccctgcttggcgcgcctgttgatgatttcacgctaccggagcactacacccgcaagcgtatccgtgcgatgggccgcgtgtcgcaaatgtcgacccgtgccagcgagctggcgttagagcaggcagggttgattggcgatccgatattaaccagcggcgaaacgggcattgcgtacggttcatcgaccggcagtaccggcccggtaagcgagttcgccaccatgctgacggaaaagcacaccaataacatcactggcaccacctatgtgcagatgatgccgcacaccaccgccgttaatactggcctctttttcggcctgcgcgggcgggtgatcccaacctccagcgcctgtacttccggcagccaggcaatcggttatgcgtgggaagccattcgccacggttatcaaacggtgatggttgctggtggtgccgaagagttatgtccttcagaagcagcggtatttgatacgcttttcgccaccagccagcacaatgatgcgccgaaaaccacaccttcaccgttcgatgaaaaccgcgacgggctggtgattggtgaaggcgcaggtacgctcattctcgaagaactggagcacgccaaagcgcgcggcgcgaccatttacggtgaaatcgtcggctttgcgactaactgcgacgcggcacatattacccagccgcagcgcgaaaccatgcagtattgtatggagcaatcgctgaaaatcgccgggttaagcgcacaagatatcggctatatttcagcgcatggtacggcgaccgatcgcggtgatatggcagaaagtctggcgacagcaaccatttacggtgataatgtgccgctctcctcgctgaaaagttattttggtcatacgcttggtgcctgtggcgcgctcgaagcctggatgagtctgcaaatgatgcgcgaaggttggtttgcgcctacgctaaacctgaataaaccagacccgaattgtggcgcgctggattacatnatgcatgaagcccgcaaggttgattgtgagtttttgcagagtaacaactttgcctttggcggcattaatacatccatcatcattaaacgttggccctgatatgtatcggatagttctggggaaagtttcgaccttaagcgcagctccactgccaccgggtttacgcgagcaagcaccgcaaggtccacgacgcgaacgctggctggcggggcgtgcattgctttcgcacacgctttccccgctaccggagatcatctatggcgaacaaggcaaacctgcatttgcgccggaaacgccgctatggttcaacttaagccatagcggtgacgatatcgccctgctgttgagtgatgaaggcgaagtcggctgcgatatcgaagtgattcgcccgcgcgccaactggcgctggctggcgaacgccgtgttcagcctcggggaacatgctgagatggacgccgtgcatcctgatcagcaactggaaatgttctggcgcatctggacgcgcaaagaagccatcgttaaacagcgtggtggcagcgcctggcaaatcgtcagcgtagacagcacctatcactcctcgctgtcagtcagccattgtcagctagaaaatttaagcctggcgatctgcacccctactccctttacgctcaccgccgacagtgtgcaatggatcgattcagttaactgatccgcccacccgactgcccatctattgatccagaacaggtaatcagtatgacgaatacttaaaatcgtcatacttatttccgccatctattttaatccattggggttaccatgctctccacactccgccgcactctatttgcgctgctggcttgtgcgtcttttatcgtccatgccgctgcaccagatgaaatcaccaccgcctggccggtgaatgtcgggccactaaacccgcacctttacacgcctaaccagatgttcgcccagagcatggtttatgaaccattggtgaaatatcaggcagacggttcggtgatcccgtggctggcaaaaagctggactcattcagaagatggtaaaacctggaccttcaccctgcgtgatgacgtgaaattctctaacggcgaaccgtttgatgcagaggcggcggcagaaaacttccgcgcagtgctcgataaccgtcaacgtcacgcctggctggagctggcaaaccagattgttgatgttaaagcactcagtaaaacagagctgcaaatcaccctgaaaagcgcctactatcctttcctgcaagaactggccctgccgcgccctttccgctttatcgccccctcgcagtttaaaaaccatgaaaccatgaacgggattaaagcgccgattggcaccggaccgtgggttttgcaggaatcgaaactgaatcagtacgatgtcttcgtccgtaacgaaaactactggggcgaaaagccggcaattaagaagatcacttttaacgtcatcccggacccgactacccgsgcggtggcgtttgaaactggcgatatcgacctgctgtacggaaacgaagggttattaccgctcgataccttcgcccgctttagccagaacccggcttaccatacccaactgtcacagccgatcgaaaccgtgatgctggcgnttaataccgccaaagcccccaccaatgagcaggcagtacgtgaagctcttaattacgcggtaaacaaaaaatcgctgattgataacgcgttgtatggcacccagcaggtcgccgacaccctgtttgccccttctgtgccctacgccaacctcggcctgaaaccgcgccagtacgatccgcagaaagcgaaagcgttgctggaaaaagccggttggacgctgcctgcgggcaaagacatccgcgagaaaaatggtcagccgctgcacattgaactttcgttcatcggcaccgatgcgttaagcaaatcgatggcggaaatcattcaggctgatatgcgccagattggcgcagatgtctcgctgattggcgaagaagagagcagtatctatgcgcgtcagcgcgacggtcgttttggcatgattttccaccgcacctggggcgcnccatacgatccacacgccttcctgagttcaatgcgcgtaccgtcgcacgctgacttccaggcacagcaaggattagccgacaagccgctgattgataaagagatcggcgaagtgctggcgacccatgacgaagcacaacgtcaggcactgtatcgcgacattctgacccgtctgcatgacgaggcggtttatctgcctatcagttacatctcaatgatggtggtatcaaaaccggagctgggtaacatcccctacgcgccgatcgccaccgaaattccgttcgaacagattaaaccggtgaaaccttaatgttgcgttacgtattacgccgctttctgctgctgatcccgatggtgctcgccgcctcggtgatcatttttctgatgctgcgcctcggtaccggcgacccggcgctcgattatttgcgtctgtctaacctgccgccgacgccggagatgctggcctctacccgcaccatgctgggactggatcagccgctgtatgtgcagtacggcacctggttgtggaaggcgctgcatcttgatttcggcatctcatttgccacgcagcgcccggtgctggacgatatgctgaacttcctgcccgccacgctggaactggcgggtgcggcgctggtattaattctgctcacttccgtaccgctcggtatctgggcggcgcgccatcgtgaccgtctgccggatttcgccgtacgtttcatcgcgtttctcggcgtgtcgatgcccaacttctggctggcatttttactggtgatggcgttttcggtgtatctgcaatggctacccgcgatgggctacggcggctggcagcacatcattttgcctgcggtttccattgcctttatgtcgctggcgattaacgcacggctgctgcgcgccagtatgctggacgtcgccggtcagcgtcacgtcacctgggcgcggctacgcggcctgaatgacaaacagaccgagcgtcgtcatattctgcgcaatgcctcgctgccgatgatcaccgccgtggggatgcacattggcgaactgattggcgggacgatgattatcgaaaacatctttgcctggcccgnnnncgggcgctatgcggtgtcggcgatttttaaccgtgactatccggtgatccagtgctttacgctgatgatggtggtggtttttgtggtctgtaatttgattgtcgatttgctcaacgccgcactggacccacgcattcgtcgtcatgaaggagcgcacgcgtgaactttttcctctcttcccgctggtcggtacgcctggcgctgatcattatcgccctgctggcgctgattgcgctcaccagccagtggtggctgccgtatgacccccaggcgattgatttgccgtcgcgcctgctttcgccggatgcgcagcactggttgggcaccgatcacttagggcgcgatatcntctcgcggctgatggcagcgacccgtgtgtcgctcggttcggtaatggcctgcctgctgctggtgctgacattagggctggttattggcggcagcgccgggctgattggcgggcgcgttgatcaggctaccatgcgcgtcgccgatatgtttatgaccttcccgacctcgattctgtcattctttatggttggcgtgctcggcactgggctgaccaacgtaattatcgccatcgccctgtcgcactgggcgtggtatgcacgcatggtgcgcagcctggtgatttcactgcgccagcgcgagtttgtgctggcatcacggctttctggcgcgggccatgtgcgagtgtttgttgatcatctggcaggtgcggtgatcccttcgctgctggtgctggcaacgctggatatcggccatatgatgctgcacgttgccgggatgtccttcctcggcctcggcgtgaccgcgccgaccgccgaatggggcgtgatgattaacgacgcgcgccagtatatctggacccagccgctgcaaatgttctggccggggctggcgctgtttatcagcgtgatggcctttaacctggtgggtgacgcactgcgcgatcatctggatcctcatctggtgacggagcacgcacactaatgccgcaacagattgaactacgtaatatcgcgctacaggccgcgcagccgctggtgcacggcgtgtcgttaaccctgaaacgcgggcgcgtgctggcgttagtcggcggtagcggcagcgggaaatcattaacctgcgccgcgacgctgggaattctgcccgcaggcgttcgccagacggcgggggaaattttagccgatggcaaaccggtttctccctgcgccctgcgcggcatcaaaattgccaccatcatgcagaacccgcgcagcgcctttaatccactgcacaccatgcacacccacgcgcgggagacgtgcctggcgctggggaaacccgccgatgacgctacgcttaccgctgccatagaagcggtggggctggaaaacgccgcacgcgtgctgaagctgtacccgttcgagatgagcggcggcatgttgcagcgcatgatgattgcgatggcggtgctttgcgaatcaccgtttatcatcgccgatgaaccaaccaccgacctcgacgtggtagcacaggcacgcattctcgatctgctggaaagcattatgcaaaaacaggcgccggggatgctgctggtcacccatgatatgggcgtggtggcgcgtctggcggatgacgtagcggtaatgtctgacggtaagattgtcgaacagggcgatgtcgaaacgctgtttaacgcccccaaacatgcggtaacgcgcagcctggtttccgctcatctcgccctctacggtatggagctggcatcatgactttacttaacgtctccgacctttcccatcactatgcccacggtgggtttagcggaaaacatcagcaccaggcggtgctgaataacgtttccctgaccctgaaaagcggtgaaaccgtcgccctgctgggacgcagcggctgcggaaaaagcactctcgcgcggctactggtaggcttagaatcgccctcacagggaaatattagctggcgtggcgaatcgttggcaaagctcaatcgcgcccagcgtaaagcgttccgccgcgatattcagatggtatttcaggactccatcagcgccgtgaatccgcgcaaaaccgtgcgcgagatcctgcgggaaccgatgcgccacctgctatcgctgaaaaaatccgaacaactggcgcgtgccagcgaaatgctgcacgcggtcgatctcgacgacagcgtgctcgacaagcgcccaccgcagttaagcggcggccagctccagcgcgtctgcctggcacgcgcgctggcggtcgaaccgaaattgctgattctggatgaagccgtttctaaccttgatctcgtgttacaggcgggcgtcattcgcctgctgaaaaagctacaacaacagtttggcactgcctgcctgttcatcactcatgacttacgcctggtggaacgcttttgccagcgagtgatggtgatggacaacggacaaatcgtcgaaacccaggcggtgggagagaaattaaccttttcctctgacgccggacgtgtgctacaaaacgcgatattacccgcattccccgtgcgccgtcgcgccacagaaaaggtttaacgcaaatgcaacgagtcaccatcacgcttgatgacgatttactggagacgctggacagcctgagccagcgtcgtggttataacaaccgttccgaagctatccgcgatattctgcgtagcgccctggcgcaggaagctacccagcagcacggcacacaaggtttcgcggtgctgtcgtatgtgtatgaacacgaaaaacgcgacttagccagccgtattgtttccacccagcatcatcaccacgacctctccgtcgccacgctacatgtgcacatcaaccacgacgactgtctggaaatcgccgtgttgaaaggtgacatgggtgacgtgcagcattttgccgatgacgttatcgcccagcgcggcgtgcggcacgggcatttgcagtgcctgccgaaggaagattaacacctaccaacgcgccgttatttccttacggcgcagtaaacttctgacaaatatcgactcacgtcacatttttttgatcacgatttggtccctcaaaatgtgagacgcttcgatcctctttttctcccgttcacctactatacgcttgaagttgtccatgattgtccatagacaactgtaaatgttcaggtgcgcgccatgaaatcattaagtaagtcgtcacaaataccgctctatcaacaagtggtggagtggataagagaaagtatttataccggagatctggtggaagacgatcgcattccttcggaataccagattatggatatgctggacgtgagtcggggaaccgttaaaaaagcggtcgcccaactggtaaaagaaggcgtgttaatacaggtccagggtaagggaacatttgtcaaaaaagagaacgtggcatatccgttaggtgaaggattattgtcattcgcggaatcgctggaaagccagaaaatacattttaccactgaagttattacgtcacggattgaatcggctaatcgttatgtggcagagaaattaagaataacgcccggtcaggatattctttaccttgaacgcttacgctcaattggtgatgaaaaagcgatgctgatagagaaccgtatcaatattgagctatgccccggtattgctgaaatcgattttaatcaacacaatttatttccaacaatagaaagtttgtcgcaaagaaaaattcgttactcggaaagtcgctatgccgcgcgattaattggtaatgaacgtggtcattttttagatatcagtgaagacgcacccgttttgcatctggagcagttagtctttttctcccgaggattacccattgagtttggcaacgtctggttaaaaggaaataaatattatcttggcaccgtactgcaacggcgggaagtgagttaagtacacttttttaagaggaataaaatgcaaggcatacattttcaggaaaattatattcaacgacttccggcagggttaagcgttgaacagatcatccgtcagttagcgcaaccgttggttgccgccgagctggtcgtccctgattttgccgatcacgtactgaaacgtgaggcgacgtacccaacggggctgcctaccgaaccaccgtgcgtcgctattccgcacacggaccataaacatgtcaggcacaatgcaattgccgtcggcatcctgccggaaccggtagagtttgccgatatgggcggcgatcctgaccccgtacctgtcagggtgatttttttgctcgccttaagcgaaagtaataaacaattaaatgccctgggctggattatggaaatgattcaggatacgccctttatgcaagccctgcttgcgatggaaacaacagaaatacacacagtaatcttaaacaaaatgaaagaacgaggtgaaatatgagtcaaaccattttatttgtctgcgccacgggtattgccacatccacggcggtaacagaaaaagtcatggaatattgcaaagagcaaggtcttaacgtcaattattcccaaaccaacgttgcctctttacctggaaatactgacggcgtagcactggtagtttcaacaactaaagtgccttatgaactcgacgtcccggtggtgaacggcttgccgattattaccggtattggcgaagaaaaagtactggcgcaaattgtttctatccttaaaaagtaattaataataattaatttcaacccactccatcaggcgctaacgcgaggtgcgctctcgcctgaaaaagaggtttattatgaacgatatcgcgcataccctctataatnnnntnnnnnatatattgggatttggcccgacggtaatgttgccgttggtgttatttattcttgctctctgttttaaagtaaaacccgctaaagccttacgttcgtcattaacagtcggcattggttttgtcggtatttatgccattttcgatattctgaccagcaatgtcgggccagcggcccaggcgatggttgaacgcaccggaattaatttaccggtggtagatttaggctggccgccgctttccgctattacatggggttcgccaattgccccgtttgttattcccctgaccattctgattaacgtggcgatgctggcgttaaataaaacccgtaccgttgacgtagatatgtggaactactggcattttgcccttgctggtacgttggtttattacagcaccggcagcctgttctttggtttgctggcggcggcgattgctgcggtggtagtacttaaactcgccgactggtctgcgccactggtacaaaaatactttggactggaagggttctcattgccgacgctctcttcggtggtgttcttcccggtcggtctgctggtcgacaaaatcatcgaccatatccctggcctcaatcgtattcatatcgacccggaaaccgtacagaaaaagtttggcatcttcggcgaaccgatgatggttggcactattctgggcattctgctcggcgtaattgccggatacgatttcaaaaaagtattgctgcttggcatcagcattggcggtgtgatgttcatcctgccacgcatggtacgcatcctgatggaaggtttattaccgctgtctgaagctattaaaaagtatctcaatgccaaataccctgaccgtgacgatctctatatcggcctggatatcgccgttgccgtaggtaatccggcgattatctccaccgccctgctgctaacgccaatctcggtctttatcgcgtttgtccttccgggtaatgaagtcctgccgcttggcgaccttgccaacctggcggtaatggcgtcgatgattgctttagccagccgtggcaatattttccgcaccgttctggcggcgatcccggtgattattgccgacctatggattgctaccaaaatcgcgccgtttattaccggaatggcgaaagacgttaacttcaaatttgccgaaggctccagcggccaggtttccagttttcttgatggcggtaacccgttccgcttctggctgctggaaatcttcaacggcaatctcatcgccattggtctggtgccggttatcgccctggtactgtatggcattttccgaatgacgcggagcacggtttatgcctgataacagcgcagctatcgttatcgatattggcaccaccaattgcaaagtcacctgcttttcctgcctggacgcaacgacgttgggcgcgcataaattcgtgacggcaaagcagatctccccacagggcgatgtcgatttcgatatcgacgccctctggcaggaggtccgccaggcgatagcgcaactgaacgccgcttcgccgctgccagtcagacggatcagcattgccagttttggcgaatcaggcgtgttccttgacgagcatggcgagatcctgacgccaatgctggcatggtatgaccgtcgcggtgaagagtatctggcaacgcttagcgaggcagacagtgcggcactttatgacatctgcggtctaccactacacagcaattactctgccttcaaaatgcgctggttgctggaacattacccgctgcgtaatcgccgcggcctgcgctggctacatgcgccggaagtgctgctctggcggctgactggcgaacagcacacggatatcaccttagccagccgcacgctgtgtctggacgtgcgcaaaggcgaatggtcagcgaaagcggcggcgttgttacacgttccctgtacggcatttgcgccattggtgcagccaggcgagcacgccggatgggtcagcgagtcactttgcaagacgcttgggttctcgcaaccggtcagcgtgacgctggccggacatgaccatatggtgggtgcgcgagcgttgcagatgatgccaggcgatatccttaactcgacggggaccacggaaggcattctgcaactggatacacaaccgacgctggatgaacaggccaaacgtgacaagctggcaaacggctgttactcacttgccaaccagttcaccctgtttgcgtcgctgcccgtgggcggtttcgcgctggagtggctgcgcaacacgttccggctaaccgatgaggagatcgccgcatcacttactcgcggacatgctgattatctggcggggaattggttgctcgatgacattcccgtctttattccacatcttcgcggttcgggttcgccctataaaaatcgccatacccgtggattattttatgggcttggcgatacgttaagtatcgacatgttaattgccagcgtatcactgggattaaccatggaatttgccaactgcttcgcctgttttaacgtgcctggcaccagcgcgttaaaagtgatcggtccggcaacccataatcctctttggctgcaattaaaggcggatattttacagcgtccggttgaagcaattgcatttaacgaggcggtttctgtcggagcattattaaccgccgcaccggatattccaccgccgccagtcgctatagcccaacgtttgttaccgaatcgggcgagataccatcaattacagcgttatcagcacaaatggaaaagctggtatcagttgaaattacaacaagaaggcgtgatgccattacatcatcgagaggaacactatgttgaataaaaccgtggaggtcagaaacagtactggcctgcatgcacgtccggcggcctgtctggcgaaagccgccaaaaaatatagctgtaaagtgacgctgcactatgagggtaatgatattaatgccaccagcatgatgaatattatgnnnnccggaataaaaggcggaaaaacggtggaaatacgctgcgacggtgatgatgaaaacgaggccatacagactctcnccgacttatttcgcgaccgcttcggtgaagctgaataattaactgatattaaaagatgaggtttttcaatatgccattagttaatggacggatactgctcgaccgcattcaggaaaaacgggtattagcgggcgcatttaataccaccaatctggagacgacaatttcaattttaaacgctattgagcgttcgggattacccaacttcattcagattgcgccaaccaatgcacaactctcgggatacgattacatttatgaaatcgtgaaacgtcacgccgataaaatggatgttccggtcagtcttcatctggatcacgggaaaacccaggaggatgttaaacaggcggtgcgcgcgggctttacctcggtcatgattgacggtgccgcattctcttttgaagagaatatcgctttcacccaggaagctgtcgatttctgtaaatcctatggcgtaccggttgaagcggagctgggggcgattctcggcaaagaagatgatcacgtcagcgaagccgattgcaaaacggaaccggaaaaggtgaaaacctttgtcgagcgtaccggttgcgacatgctggcagtttctattggcaacgttcatggcctggacgatataccgcgtatcgatatccccctgctgaagcgcattgccgaagtctgtccggtgccgttggttattcacggcggctccggtatcgccccggagatattacgcagctttgttaattatcgcgtcgctaaagtaaatatcgccagcgatctgcgcaaagcgtttatcaccgccgtcggcaaagcgtatgtgaataatcacaacgaggcgaatctggcacgagtcatggcatcagcaaaaaacgccgtcgaggaagatgtgtatagcaaaatcctgatgatgaatgaggggcatcggttggttagaaaggcatcttaagagccacaannnnnnnnnnnnnnnacagaaattgttgggccgctataagttataaatgattcaaacgctcattcagtgtttcaataatataggtattaacagagacttgttgctgcncagccgcattattaaggcgttcactcagcgattctggatagcgtaacgtaaaggtcttaatcttttctgtacgcgcatacggctcaatacccgcagctttacaatcctcaagatactctcgcagggaaagttccccttctttttgcagcccctgaatgctgtcagagacaaaatcacaataacctgacaagcccaggaatttgccacgaaatgcattcagttctggcacgtaagtgataacagcaggttgcccggcaatctccatagagtttggcgtcttcagtttgatcatggttttacccctatacttagtaaccagtcacgcacgctttctacagcgcctttatcggtatctggcgacggatgaggccgatggaaacacgcaacgctcatatttagtatgaacttacaacgcgaacctcttccttccttaatttctccgcctaatgctttaaccagtgactctatatcagaccacttgatcccttgaggaacaggagttttaaatatttgatccaatgtatttttttgtttcttccgtaaagcctgtaccttggttctcatggcatgtccttatgacttcactttatgacatcaatagtatgacatcacagtatgaagtcaagtttcccttccttacgccattgtcccaatcgtcttcctgaatcgcagcagcgcaatggtgaaaaacgcgccgccaattgccatcagcgtcaggaactgcggccagacgatttcgaatccggcaccacggtagagaatggcctgcgcgaggctaacaaagtgtgtcgtcggcatgatcagcataatgtcctgcaccatctgcggcatactttcgcgcggcgtggaaccaccggaaagcatttgcagcggcagcagcaccagaatcaccagcagccccagttgcggcattgaacgcgctattgtccccataaaaatgccgattgacgtggtggcaaacagactaagcgccacgcccagcataaacagcgggatcgagccttcaatcggtacgcccaacacgccttttaccatcagcaccagtgataatcccgataccaccagcaccaccaaccccatcgaccagatcttcgccatcatgatctcaaacggcgttatcggcatcaccagtaagtgttccaccgtgccgtgttcacgctcgcggatcagcgccgatccggtcaatacaatcgccagcatggtaatgttgttgatgatcgccatcaccccgccaaaccacgcgggatcaaggttcgggttaaagcgcatccgggtttccagcgataccaacggttcgctgttatcacggtagcgcgcgacaaagctgttcacttcaccgttgataatattctggatatacccattgccggtaaatgcctggctcatgcgcgtggcatcgacgttcacctgaatatctggctggcgtccggcgaggacatcacgctgaaaattaggcggaatatttatcgcaaaggtataacgcccggcgtccagtccggcatccatctcatcggcggtgatcatctccggtggcaaaaaccacgggcgatagaagctgttaacgatccggttcgataactgcgattgatccatatcggcaatggcgatcggtgccaggttcaacgatcctggcgtgacggtcgctgacgaatacaccgacaccgtaaacgagaagacaatcaatgtcagcatcgctttatcaccgagtagactgcgcaactctttgatacccagattaaaaatattgcgtaaatggcgcatcatccctcctgttttttcagcagcaggatgcttaagcccatcaccagcggtatggctatcagcaacgggataaaaagttgccacaaatcagtcagatccagcgctttcgagaacgtcccgcgggcgatagtcagaaaatgactggtcgggtaaacctcgccgatccaacgtcccggcccttccagcgaagctaccggatcgatcatcccggaaaactgtgtcgccgggatcaacgtgataatcgccgtaccgaaaatggcggcaatctggcttttcataaaggtggagatcagcagccccattccggtggcgatgatgatatacagcagcgccgccagggtgagcgtcaggaaactgcctttatgcggtacgccaaacacaaacaccgacaggccgcagagcaggaaaaagttcagcatccccagcgcgatgtacggcagctgtttgccaagcaaaaattcgctacgggtggtgggggtcacgtaaaggttgataatcgaccctagctctttttcccgcaccacgctaagggcgcttagcattgacgggatcatcatcagcagaagcgggatcaccgccggaacaatcgctggcaggctttttacgtccgggttatagcgataacgcgtctcaatattcatcagcccgctttggctggagggtgtggattgtcggctcgccacatcctatagccagctctggtgcatggcctgcacgtaaccttttacagtttcggcgcggctcggcatcgcaccgtcgatccagacaccgagttccacaggcgtaccacgcgcgatatcnnncccgaaattgggcgggatctcaattgccaccgtgatatcgcccgcacgcatccgacgatcaagctcgtcataactggtaagcagcggctgttcgataaagtaacgggaaccggagagattgagcgtccacgcctggctactgacggtctggtcgcagtcaagcaccgcaaagcgcaggttttccacatccatactgatgccgtaacccattatcagcatcaggatcactgttcccatcagcgccagcgtcgaacgtaccggatcgcgtcgcagttccagcgcttcgcggcggctgtagctaaacagacggcgcaggctaaatccctggcgcggcgcgtgtgtggtgtcgtgtatcacgggaggcgcttcggcttcgttgctctgtcctgccgcttcctgcaaataggcgataaatgcctcttccagactggcggctccgcgtttctcaaccagttcctgcggtgtaccgctggcgagcacttttccggcgtgcatcagagagatacggtcgcagcgttccgcttcgttcataaagtgggtggagatgaagatagtcactttgtcctggcgcgagagatcgaccatcaactgccagaacatatccctcgccaccggatcgacgccagaagtaggttcatcgaggattaacatttccgggcgatgaatcaccgccaccgccagcgaaagccgctggcgaatgccgagcggcaatgactccggcagaacatcttcaacgtcgttgagcttaaaacgctcgctcatttcagccactcttgcgggaatttccgcttccgggatgtgaaacaaacgggcatgtaactcaaggttttgccgcacggtgagctcgttatagagcgaaaacgcctgcgacatatagcccacccgacggcgagtatcgatatcttttggatcaaccggttgcccgaacagccacgcctcaccttcgctggcgggcagcaatccggtaagcattttcatggtggtggatttaccgcagccgttcgaaccaagaaaaccaaaaatctccccgcgtggaatgcggaaattgacgtgatcaacggcaacgaaggaaccaaaacgcatggtcagatcgcgcgcttcgatggcaatctctgcgttttcaggttgatatggtgggatcactaccgcctgatgcgcctggcgttgcgcttgcggtaacagatttataaatgcttcttccagcgtggcgctttgcgtttgctgccgcagctcttcggcgctgccagttgccaacacttctccggcattcatcgccaccaaccagtcgaagcgttccgcctcttccatataggccgtggcgaccagaacgctcatattgctctgccgctggcgaatactgtcgatcagatcccagaactgggcgcgggagagcgggtcaacccccgtcgtaggctcatcaagaatcaacagttccgggtcgtggattaacgcacagcacagccccagtttttgcttcatcccgccggagagtttccctgccggacgatcgcgaaacggtgctaacccggtgctggtcagcagctcattgattcgcacttcccgctccgctttgtcgtgaccgaacaggcgagcgaaaaaatcgacgttttcatacaccgacaaggtgtggtagaggtttttgcccagcccctgcggcatccaggcgatgcgcgggcagacgtcgcggcgatgcttcgggtcgcgcatatcgccgcccagcacgatcacattgccctgctcaatgacacgagcaccggaaatcaatgacaataaactcgacttcccgacgccatccggaccaatcagcccgaccatacagcgggccggaatatcgagtgtgatattgttcagcgcaacggtttttccataatgctggctcacgcccgccagttgcgcgacaggcgggacgggaaccagttccagatgcgtcattgcggcaacctcaccacgaggtcgtcaggccacggaagttcttcattcacccgcacccacgctacgcccggcaagcccgttttgacatattccagatgctgctggagtaattccggtgggatacgcgctttgacgcggaacatcagtttcagccgttcatcgctggtttcgacggtttttggcgtgaactgggcgacactggcgacaaaactgatggttgcaggaatacgcagatctggcgcggcatcgaggatcagccgggcttcaccgccaagtttcagcgtgcccgcctgttcggttggcaggaagaaggtcatatagacgtcgctgagatcgaccatattcagcacccgaccgcctgccgccagcacttcccctggctcggcaacccgatactgcacgcgtccgtcacgcggggctttcagttcgctgtcatcgatatctgcggcaatgcgccgttcagtggcttgtgcggcttcgacgcgggtttgcgcctgaatgatattggtgcgtgccgcttctnnagcggcnntagaagccgaaacctgggcttttgctgattccagcgcagctcgggcgctctcagcggcggcgcgatcgtcatccagctgttgcgcagaaatagcccctcgttgggcgagcgagcgggaacgcgtatgacgtttggcaacggagtccagttcggcctggcgttgattaaccagcgactgtgcggcgcgagtttcgctttgtcgttgctccagcaaagcctgcgcggcggcaacggcgctttgtgcntctttgatttgcgcgatggcttccagtcgctgctcctgcaacacgcgagtatccatcttcgccagcacttcgccttcgcgaacaaactggccttctttcaccagaatggtgtcgatacgcccggcaattttgctggcgatatccacttccgtcgcttcaatgcgcccattgctgacggcaaagccttccggcacacctgccgggcgcaacagccaccacgntacgatagcagccaccgccagtaacccgacaccccaccacgccagatggcgcttactcttatccataatcgacccgccataatccctgtaagcaaacgacgcgtgttacaactgccgccgaacgacgttcagcggattcttccatccgggataagaaggaaacgacaaatacgaccagcgcgcagagcattgagcgccaacggggaaggcttagtgaaaacgggtagtaatgttgtcatcatcagcattcctggccgtaaatgaaacacgcatactcataagtgtgatctataaaactggctgacaaaacggtatccatcctgttggatagcgtttcacgcctgttcagttgcaggaacagagcattccttattacgttttatcaacagtctcaaccagatagtaacattaatattcatgttgtctatggttcagagctgtaacattgtgcgccttctaatcaaaggcataagtccatttctgtttttttcatgttggtaagacttccagggagtggttatctcaggccccgcaccagggttaatttggcaattatgcatgctgaacattcttcccgtatgtttactgtcacgggcgttaagacctaaaactgtccccgtttcacctatgcgttctcttccaccattaccgttatgtgcaacaacttgatttatacctaacatttgtgagcatgctaatagtgcttcaagtttaggtctgtaatctgtcgaaacagaaaaataacgattaaaggatcgacaagagatagcccggctagttttaaactttttactattaattatagtatgatgctttttattaataattgccgctaattcgaccggatcgagagcattggtcatttcatcaatagagaccgttatcggtcctataatgtaacgttttcgctgatcatcaaaagttatcccatgatgatttgccattattttgtatttggagtcatagaaacatacaggataatcttttatcccgtcgtaggtatcctcatcaagtggtttcatacgcgtgaagttctgcatatagttaccattgcaattcgtttcatgatttccagctaatacatgaacgttatcattgatgctcattatgcgttttaacaaatcgatgataaattgatcgccacagatattactaaatcgatcgccggtttggtcacccaaaaacgtacatggcgtcactgcgtctttattaataactaaataaggctgaagactttctaaaataatgtctcttctgttcaggatactgattattgtattaacattagtatcaagttgctcattaaagttctcccttagcaatacattgagaacttcatcttctatattaagcaactggctaaggaaattttctccttcagccatgattcccaaatgtcccgttgcaaaaagcgcgtacaaaactgcaccaactgagccatcggtatcaccaaaataggttggtctggtacttgtgggatcaacaggtgaacaattggagaaatagattctgtcagcgaactggggttttataattgtttcgaatttaatatcagatacattgtattgcgatattttccagttccagatgggtttgtacgactcagtaactgcaacatcattagcattatcatttactgtcatattattaagtaaataaacaatgctgcaccaattaatatcggtattatcaagagggcaaccgtaatttttgctattaatcgtcacaataaactgataatggttattcctacgtagaatatgagcacgcatgcccgatagcatactatatttttctgaataatccgtttgtatggtaaatgaaattttgtcatcttgaatagattgttggaaccgttctatttgccaatcatctactttttccagaacctcaccgagcattgtcctagcaatacttgatatatcatcacctataccatttgcaatatacccaaacagttctttagtgaagttagtaacatgctcttgcaccatatcatttgttgcgattgtcgttgtactgtcgttagtacctgccacagttccaattttcatcttttacctcatataattcaccgcgaggaatacatagttatcatttaatcttatgacatacacctcatgttcgatggaaaaataattatattttgcacaaatcattcagccttaaagcataatatganatttcttatctcanagtagagaaagtccctaaagattgtagaggcgtcatcagtacatgcctctacaatcgattaagaaaaactatgaaatactggcaggattaaaaagatataccacagcactcatagagttttaatgtggttgaaaacaacttagtcctgaggaagaacctattatttttttattttcatcaaacactgccatcctggaatttagccccataacaccattatcaaattgttgattctgatttacccctaacccatgatggccatatttttgtctaatgtttttgcgggggtcgccacattcgagcgtctgtccacatttgaagatatcttcaggatctggtctgaaatcagtagtgttatttaaataatcagcatatacaggtgtgggtgccatagtattgcttctaattagatggaaaagatgatcatccatatgttgtttatgttttttattaaatatatatgctaattcctcaggatcagtaggatttttcatctgattaaatggaacctgcaaagcaccgagacaataacatttattttcttcatcccttattattccgtgatgactggttaaaacatgcctttctgagtcataattacaaacatcgagcgttttaattaagttatatgtatcaccggaagagagtttatgatttgctagtcgtgcactatagttaccattaaaattgatttcatgatttccagccagaacaacgacatttttatttatacgactatctttattaccctccatatttcgcatagaatttagcaaagtaaggatatatttatcaccaaaaatagtactgaatctatcgcctgtatgatccccaaggaagatacaaggggtaatcgcatcgccttttaaaaaaacatgttgatgcaactcattcaagatcatgtctctcttatctaataaagtgaagagttttttcaattttttatttttatatgcgaatgaagccatgtcttcgtgtttcaataaatcacataataaactcccccccttttccctgatgcctatatgccctgaaacgagcaatgcataaagtacagcgcctactcttccatctgtatcgccaaaataagccgtgttggcattttgtgggttaatcacaccacactgtttataaaagtctatttntgaaaaaacagattcaacatagctatcaaacttttccttagtaaacgtctctttagagacagcccaacgccagtcaggtttgaaattaccactaagaagagtaaagaaatttctctctttgatagaaaacccatcaactttataaattatgtctgatttatccccggagaaattaataaaataataaccgtccttacgctcaatcgtaacggtaatgggagacgataattttatcacatggttattgtctggtataattgtaaanataaacgtgtcagtagtattgtcggcgaaactattatattctttaatatctatagatggctcactattgtaaaaccatattttctctatctgaggactatgttcagttacgttccagcagccatgttgcaggaaatagatgatatgcaggccaaaatcgttatctatttgcgaatgtttatccagcttatcaatttcaactatctctgaacgatgttttttatcaaccttgccatggtgttgatgattattaactttatctgaatgcttatcttgatggtttgaagagatgtacttaaatatattgtgaaatactttcataaataacccgtgatatttttgacttgttagtaacaaaataaatgatacatgtctgaaagacatattttttgaccgatataaagcaataatgcgtatatactcgctgattttaagcaccgagaccatccggtcttttaccaaataatgaaaaagaatccctccctggaagataattgtaaaaaacaacagaataagaattaatcttaggataaatatttatttatcatggccttttgaacgctgaaaagtagcgctctgcaaagtaaaccccgctatagttatgctatgcatttgtctttaatgatatctcgtcattgtattaacaggctgaaattatcattaatgcacatttcaatattagcagggatacctgaggagtttaaagtgaacatatatatcgggtggcttttcaaattaatccctttaattatgggcttgatttgtatcgcgttaggtggctttgtgctggaaagttcagggcaaagcgagtatttcgtcgcgggtcatgtgctcatttctctggcagccatatgcctggcattattcactaccgcatttattatcatttcgcagctcacgcgcggcgttaatacgttttacaatacattgttccccattattggctatgcggggtcaattatcaccatgatatggggttgggcactgttagcaggtaatgatgtgatggcagacgagtttgtcgccggccatgttattttcggcgttggtatgattgccgcctgtgtatcgacggtggcagcgtcatccggtcactttctgctcattcctaaaaacgcagcggggagcaagagcgacggaacaccggtacaggcttattcttcattaatcggtaattgcctcattgccgttcccgtgttactcaccctgctcggtttcatttggtctattacgctgttacgtagtgccgacataactccgcattatgtcgccggtcacgtattgctcgggttaaccgcaatctgtgcctgtctaattggccttgttgccacaatcgtccatcaaacacgtaatacgttttcaacgaaagagcactggctgtggtgttattgggttatttttctcggctcaatcacggtgctgcagggcatatacgtcttagtcagttctgatgcaagcgcccgactggctcccggtattatcctcatttgcttgggaatgatctgttacagcatattctcaaaagtctggctactggcactggtctggagacgtacctgttcgttagccaacagaataccgatgattcccgtcttcacctgcctgttttgccttttcctggcatcgtttcttgcggaaatggcgcagaccgatatgggatattttattccttcgcgggttctggtcggtttgggagcggtatgctttacgttgttctcaatcgtttcaatattagaagcgggttctgctaaaaaataattgcaacgtaccggataaaaccagcgttaaccatttgcgtaacgctggtttttcttaggtagaatgaaataacgcagcattaatgcatagtggttaagtataaaaaacagcaaagttactgtttttttttcaacctgttcatattttataaagatcagcccactgggtgagttttcaatcacctttccctccaccttatattaagcatggggggttcagttcacgggctcattagaaaataatcacaagatagccactatcaaaattagctcatttttaatgcgactctaataattttcatctttaggaaaaatagctcagcacgacttcgctgcaatcaaatcctgcgcacaagcccacgcactcgaccacgcccactggaagttatagccccccagccagccggtaacgtccatcacttcgccgataaagtacagcccaagcactttgcgcgcttccatcgtccgtgaagagagttcgttggtgtccacgccgccgagcgtcacttcggcagtgcgatagccttcagtgccgttgggttgtacgcgccagtcggtcaatgtgctaatcagtgcctgttggtcacgcacgttgagctgttttagcgaaacatccgggatttgcccgagttgctgtaagcgttcaaccaaccgcttcggtagatgaaccgccagtgtgtttttcaggctctgattcggatgtgcgttacgctgctcattcaggaaggtttcgaggtccacatccggtagcagattgatactgacaaattcccccggttgccagtagctggaaatttgcaacaccgccggtccagacaagccgcgatgggtgaagagtaagttctcacggaaaacggtgccgttttcagcggtaatcacggaaggcaccgccacgcccgccagcacctgtaactcttcgagcaacggtttatgcagagtgaatggcaccagacccgnnnnggtcggcagcacgttgaggccaaattgttcggcaatcttataaccaaacggcgacgcgcccaggcccggcattgacagcccgccggtcgcgatgaccagcttttcacaaccgacagtcatgccgttcagttcaagcgtgaagcctgtatcatccttcgccacactcagcacttcgctacgcaatctgacggtcacattgcccttctcgcactcatccaccagcatgtcgacaatctgctgcgcggagtcatcgcagaagagttgccctaacgttttctcgtgccaggcgatgccgtgtttattgaccagatcaatgaaatcccactgggtaaaacgcgcgagtgcagacttacaaaaatgcggattctggctcagataagcgcccggttcgacataaaggttggtaaagttgcagcgcccaccgccagacataaggattttgcgccctggttttttaccattatcgatcagcagaacccggcgtcctgcctgacctgccagcgcagaacagaacatacccgccgcaccagcgcctataataatggcatcaaacctttccacgttgcgctcctcttagaaaaaacgggcgtgaattgtaaagattcctcagtggtcgcaccagcatcaatattactaaaaggaagtatttgcctgaattatatnagataattattttttgagtgaaatccatacaggaggcaaatcaaaaaaagtctatatttcactttgcccgcgccgcgaaagtcactgataatgcgccgcgttcatgtcctcaaaatggcgtaaccgtcctatgctacatttgtttgctggcctggatttgcataccgggctgttattattgcttgcactggcttttgtgctgttctacgaagccatcaatggtttccatgacacagccaacgccgtggcaaccgttatctatacccgcgcgatgcgttctcagctcgccgtggttatggcagcggtgttcaactttttgggtgttttgctgggtggtctgagtgttgcctatgccattgtgcatatgctgccgacggatctgctgcttaatatgggatcgtctcatggccttgccatggtgttctctatgttgctggcggcgattatctggaacctgggtacctggtactttggtttgcctgcatccagctctcatacgctgattggcgcgatcatcgggattggtttaaccaatgcgttgatgaccgggacgtcagtggtggatgcactcaatatcccgaaagtattaagtattttcggttctctgatcgtttcccctattgtcggcctggtgtttgctggcggtctgattttcttgctgcgtcgctactggagcggcaccaagaaacgcgcccgtatccacctgaccccagcggagcgtgaaaagaaagacggcaagaaaaagccgccgttctggacgcgtatcgcgctgatcctttccgctatcggcgtggcgttttcgcacggcgcaaacgatggtcagaaaggcattggtctggttatgttggtattgattggtgtcgcaccagcaggcttcgtggtgaacatgaatgccactggctacgaaatcacccgtacccgtgatgccatcaacaacgtcgaagcttactttgagcagcatcctgcgctgctgaaacaagctactggtgctgatcagttagtaccggctccggaagctggcgcaacgcaacctgcggagttccactgccatccgtcgaataccattaacgcgctcaaccgcctgaaaggtatgttgaccaccgatgtggaaagctacgacaagctgtcgcttgatcaacgtagccagatgcgccgcattatgctgtgcgtttctgacactatcgacaaagtggtgaagatgcctggcgtgagtgctgacgatcagcgcctgttgaagaaactgaagtccgacatgcttagcaccatcgagtatgcaccggtgtggatcatcatggcggtcgcgctggcgttaggtatcggtacgatgattggctggcgtcgtgtggcaacgactatcggtgagaaaatcggtaagaaaggcatgacctacgctcaggggatgtctgcccagatgactgcggcagtgtctatcggcctggcgagttataccgggatgccggtttccactactcacgtnctctcctcttctgtcgcggggacgatggtggtagatggtggcggcttacagcgtaaaaccgtgaccagcattctgatggcctgggtgtttacccttccggctgcggtactgctttccggcgggctttactggctctccttgcagttcctgtaatagtacgcaccaaaacgagcgggtcagtttactggcccgctttttttatgcgttattattgctgaagtgcttaatgccaaatcatcaaggcaatcaggctgaccaccaccagaccacacaatgcgctggtcagaataaactgccgacgcacccgctcacagcggcgaataaactcatcatcgtgatgatcgcgataacgttgggcatagatataccaaacgagacgcacctgtttgttgggttggccatgtgaggtaaaaaagccccctccatcaacatattgatagagcaatggatcgcagttacgcagtaccactaacaacgcgcgtagtgatgagaaatagngcgccatgttaacaatgcaaacgacacataaagcccaaaataatgcgacggtgcttatcatacctcctccccggcgacctgcccgcggagttccaccccggggctaccgctcccgatacgctgccaatcagttaacaccaggtcctggagaaaccgcttttgtggtgaccaacatccgagcggctctatagatagtgtaggagatcaggttgttttttttccagaaggttaaccactatcaatatattcatgtcgaaaatttgtttatctaacgggtaagcaaggcggattgacggatcatccgggtcgctataaggtaaggatggtcttaacactgaatctttacggctgggttagccccgcgcacgtagttcgcaggacgcgggtgnnnntaacggcacaagaaacgctagctggccagtcatcgacaactttatggaaggagtaacactatggcttataaacacattctcatcgcggtcgatctctccccggaaagcaaagttctggtagagaaagcagtctctatggctcgcccatacaatgcgaaagtttctctgatccacgtagatgtaaactactctgacctatataccgggcttattgatgtgaatcttggtgatatgcagaaacgcatctctgaagagacacatcatgcgctgaccgagctttccactaatgcaggctacccaatcactgaaaccctgagcggcagcggcgacctgggccaggttctggtcgatgcaatcaagaaatacgatatggatctagtggtttgtggtcaccaccaggacttctggagcaaactgatgtcttccgcacgtcagctgatcaacaccgttcacgttgatatgctgattgttccgctgcgcgacgaagaagaataatcttccctccacgacgtgttcctgaacgcccgcatatgcgggcgttttgctttttgtcgcgccttgttacctgatcagcgtaaacgccttatctggcctacggtctgcgttcgcaatcaaaatccccagccaatacaatatttaacaccaccatattttccatcattagtgtgatcagctggttattttctgttgtaatagtgtattaatctattcaccgcatcaatattaagaatctctgacagatgtaaactttttcgcgcgttatcccttacgcgttcatacttttcaggatggtattggaaggttaataaatatgaatacaacaacacccatggggatgctgcagcaacctcgcccatttttcatgatcttttttgtcgagttatgggagcgattcggctactacggcgtgcagggcgtactggcggttttcttcgttaaacagcttggattctcgcaagagcaggcttttgtcacttttggtgcttttgctgcgctggtctatggcctcatttccattggcggctatgtcggcgaccacctgctggggaccaaacgcaccatcgttcttggagcacttgtgctggcgattggctacttcatgaccggcatgtcgctacttaagcctgacctgattttcatcgccctggggactatcgctgtcggtaacggcctgtttaaagctaacccagccagcttgctttcgaagtgctatccgccgaaagatccgcgccttgatggcgcattcaccctgttctatatgtcgatcaatatcggctcgttgatagcgttatcgctggcccctgtgatcgctgataaattcggctattcagtcacctacaacctgtgcggtgcggggttaattatcgcattactggtttacatcgcctgtcgtggaatggtgaaagacattggttctgagcccgacttccggccaatgagcttcagcaaactgttgtacgtattacttggcagcgtggtgatgatcttcgtctgcgcctggctgatgcacaacgtagaagtcgccaatctggtgctgattgttctctccatcgtcgtcaccatcatcttctttcgtcaggcattcaagctggataaaaccgggcgcaataaaatgtttgtcgcctttgtcctgatgctcgaagcggtggtgttttacattctctacgcccagatgccaacatcgctgaacttctttgccatcaacaacgtgcatcatgaaattctcggtttttccatcaacccggtcagcttccaggcgcttaacccgttctgggtggtactcgccagcccaatactggcaggcatttacacgcatctgggtaacaaaggcaaagacctntcgatgccgatgaaatttactctcggcatgtttatgtgctcactgggctttttgacggcggcagctgcgggaatgtggtttgcggatgcacaagggctgacatcgccatggtttatcgtgctggtgtacttattccagagcttaggtgaactgtttattagcgcccttggcctggcgatgattgctgctctggtgccgcagcatttgatgggctttattctcgggatgtggttcctgacacaggctgccgcgttcttgctgggcggctatgtggcaacatttaccgcagtaccagacaacattaccgatccgcttgagacgttgcctgtctataccaacgtgtttggtaagattggtctggtcacgctgggcgttgcagtagtgatgctgttgatggtgccgtggctgaaacgcatgattgcgacgccggaaagccattaattattcttgcagaaagcagggtagcgttatcgctaccctgctttacttttacactggcgtacctgcatagatatcaaagcgatgccctttagtcacaaccgcgtttggcgtggcgacattcgctagcggtggcgcgtagtccgggcgctttaccaccacgcgtttggtcgccagcaagcgtgcaggctccagtaatccatcggcatcaagatccggtcccaccagcgactgaaagacgcgcatctcttttttcaccagcgcgcttttctgcttatgcgggaacatcgggtcgagatagaccacctgcggacgcggggtaatatcggtcagcgccgtcaggctggaggcgtgaattaactgcaaacgctcctgcaaccagccgccgatttccgcatccgcatatccacgcgccaggccgtcgtcgagtagcgcggcaacgactggattacgctccagcatccgcacgcggcagccgaccgaagccagcacaaaggcatcgcgccccagccctgcggtagcgtccaccacatccggcaaataatcgcctttaatgcccaccgctttcgccaccgcctcaccgcgaccaccgccgaatttgcgtcggtgcgccatcgctccgccaacaaaatcaacaaagatgccgccaagttttggctcatcacgcttgcgcaattccagatgttccggcgttaacaccagcgccatcaggttgtcttcatcgtgctccagcccccagcgggccgccagaacagataaggcaccgtctccggtgcctgtttcatcaattaagcagattttcactgaatgatcagcccttaatgccgtaatgctccagcatcgcatccagctgcggttcacgaccacggaagcgtttgaacagatccatcggctcttctgaaccgccacggctcagaatgttgtcgaggaacgactgcccggtttcacggttgaaaatgccctcttcctcaaagcgcgagaaagcatctgccgccagtacgtcagcccacaggtagctgtagtaacctgcggcataaccaccggcgaaaatatggctgaaagcgtgcgggaaacggccccaggatggagacggtactacggcaaccagtttcttgatttctgccagagtttcgaggattttcgctccctgatccgggcggaactcggcatggaggcggaaatcgaacaggccgaactccagctggcgcagaataaacagcgccgcctggtagttcttcgccgccagcattttatccagcaactctttcggcagcggttcgccggtttcgtagtgaccagagataaacgccagcgcctccggctcccagcaccagttttccataaactgactcggcagttcgaccgcatcccacggcacaccgctgataccggaaacaccggcggtttcgatgcgggtcagcatatggtgcaggccgtgaccgaactcgtggaacagagtgatcacttcgtcgtgagtgaacagcgccggtttaccattcaccgggcggttgaagttacaggtcagatacgcgaccggtttttgcagcgaaccatcggctttacgcatctggcctacgcagtcatccatccacgccccgccgcgcttgttttcacgggcatacaggtcgaggtagaaactgccgcgcagttcgttgttctcgtcatacagttcgaagaaacgtacatccgggtgccagacatcaacatctttacgctctttagcggtgatgccgtaaatacgttttaccacttcaaacaagccgttaaccgctttgttttccgggaagtacggacgcagttgttcgtcgctgatgctgtagaggtgctgtttttgtttttcgctgtagtatgcgatatcccacggttgcaactcatccacgccaaattcggctttggcgaaggcacgcagttgcgccagctctttttcgccctgcggacgcgcgcgttttgccagatcggttaagaaatcaagcacctgctgcgggttttccgccattttggtagccagtgatttaaacgcgtagttttcaaagcccagcagttgcgccagttcgtgacgcagcgcgaggatctcttccatcaccttgctgttatcccatttaccggcgtttggaccttgatctgaagcgcgggtgctgtaagcacgatacatctcttcacgcaagacctggttgtcgcagtaggtcattaccggcaagtagcttgggatatccagcgtcaacaggtagccttccagctctttcgcttcggcctgggcttttgccgcagccagcgcgctttctggcatccccgccagttccgcttcgtcggtaacgagtttagtccagcccatcgtcgcatcaaggacgttgttgctgtactggttgcccagttcagaaagacgagtggcaatttcgccgtaacgctgttgtttctctttcggcagaccgatgcctgagagttcaaaatcgcgcagtgcgttatcaaccgcttttttctgagccgtgttcagcgtggcgtaatgatcgccatcgcgcaggtcgcggtacgctttatacagcccttcatgttgccctacccaggtgctgtattccgacagcagcggcagagtttgttcgtacgcttcgcgcaattccgggctatttttcaccgagttcaggtggctgaccggggagaaaatacgccccaacacatcgtccacttccgccaacggctggcagagattttcccaggtgtacggtgctccttgcgctactacgcgctccacattttcgcggcagtcattcaatgccttagtcacggctggaacgacatgttccgggagaattttagaaaacggaggcaattcaaagggagtcagtaacggattcgtcattagcgcagtcctggttaaagaggttaaggaagcgctcaacaggcgctttacataatgtttgtagcatggggttaagtgtagtgaatttcaatgagaaacgttacgctttcgcggcggcggcctcttttcggtatactgtcctgataggcttttgtgcgccccgaatacgggccgatttttacttaccggaacacctttacccatgctcagttatcgccacagctttcacgctggcaaccacgccgacgtccttaaacataccgttcagagcctgatcatcgagtcgctgaaagagaaagataaaccgtttctctatctcgacacccacgcaggggccgggcgttatcagttaggcagcgaacatgccgagcgtaccggcgaatatctcgaaggtatcgcccgtatctggcagcaggacgatttgcctgcggagctggagccgtacatcaatgtggtaaaacacttcaaccgtagcggtcagttgcgttactaccccggttcaccgttgattgcccgtcagttactgcgtgaacaggacagcctgcaactgaccgaactgcacccgagcgattacccgttgctgcgttctgaatttcagaaagacagccgtgngcgcgtcgaaaaatccgacggtttccagcagcttaaggccaaactgccgccggtttctcgccgtggtttaatccttatcgatccgccgtatgaaatgaaaaccgactatcaggcggtagtcagcgggatagcagaaggttacaaacgtttcgccactggcacttacgcattgtggtatccggtggtgctgcgccagcaaattaagcgcatgatccacgacctggaagcgaccggcattcgcaaaattctgcaaattgaactggcggtactgccagacagcgatcgccgtggcatgaccgcttccggcatgattgtgattaacccgccgtggaaactggaacagcagatgaataacgtgctgccgtggctgcacagcaaactggttccagctggcaccgggcacgccaccgtaagctggatcgtgccagagtaattgcagccattgctggcacctattacgtctcgcgctacaatcgcggtaatcaacgataaggacactctgtcatgactaaacactatgattacatcgccatcggcggcggcagcggcggtatcgcctccatcaaccgcgcggctatgtacggtcagaaatgcgcgctgattgaagccaaagagctgggcggcacctgcgtgaacgtcggctgcgtaccgaagaaagtgatgtggcacgcggcgcaaatccgtgaagcgatccatatgtacggcccggattatggttttgataccactatcaataaattcaactgggaaacgttgatcgccagccgtaccgcctatatcgaccgtattcatacttcctatgaaaacgtgctcggtaaaaataacgttgatgtaatcaaaggctttgcccgcttcgttgatgccaaaacgctggaagttaacggtgaaaccatcacagccgatcatattctgatcgccaccggcggtcgtccgagccacccggatattccgggcgtggaatacggtattgattctgatggtttctttgcccttcctgctttgccagagcgtgtggcggttgttggcgcgggttacatcgccgttgagctggctggcgtgattaacggcctcggcgcgaaaacgcatctgtttgtgcgtaaacatgcgccgctgcgcagcttcgacccgatgatctctgaaacgctggtcgaagtgatgaacgccgaaggcccgcagttgcacaccaacgccatcccgaaagcggtagtgaaaaatgccgatggtagcctgacgctggagctggaagatggtcgcagtgaaacggtggattgcctgatttgggcgattggccgcgagcctgccaatgacaacatcaacctcgaagccgctggcgttaaaaccaacgaaaaaggctatatcgtcgtcgataaatatcaaaacaccaacgttgaaggtatttacgcggtgggcgataacacgggtgcagtagaactgacaccggtggcagttgcagcgggtcgccgtctctctgaacgcctgtttaataacaagccggatgagcatctggattacagcaacattccgaccgtggtcttcagccatccgccgattggtactgttggtttaacggaaccgcaggcgcgcgagcagtacggcgacgatcaggtgaaagtgtataaatcctctttcaccgcgatgtataccgccgtcaccactcaccgccagccgtgccgcatgaagntggtgtgcgttgggccagaagagaagattgtcggtattcacggcattggttttggtatggacgaaatgttgcagggcttcgcggtggcactgaagatgggcgcaaccaaaaaagacttcgataataccgtcgccattcacccaacggcggcagaagagttcgtgaccatgcgttaaatgttaaagggcaaagagtggtgtgctctttgcccttaattacgtttccgctatcagttcagaagctgaagcagaaagcggatcagttccagcagcgcaattaacgccccaagaacgatgattgctttatcaatcacccgtgttctccatacgatggagtgagaatgcatccgcttactcatccatcgcctgtcacggcgcatgccctattgttagataatggtattctcactccggccagagcatcagttaacggcaccacccgtaccactgaacaggactttgaaagcgtttatgcgcattgccagagtgaaaatgcctcagagctaactggataatcatacagtatattcaggttataaaaccagcatgtccttgcaatagtttcagtatggtattagtattgatgcgttagatgatggcattctcactccagccagagccaccaactcagggctgaagagtaaaaaaaccgacgcgaagtcggtttttttacatccggattcggacaaagcctggtacggcagcgacccgatgaaagtatataaatcctctttcaccaacatgtatagcaaactgtcccttctccagctgaagaaatcgctaacgcttgcaatgttagccactggctaatagtattgaaccgttagatgtgggcattctcactccagccagagccaccaactctgggctggaaagtaaaaaaccgacgcaaagtcggtttttttacgtcctgattcagacctcctttcaaatgaatagccaacgcttaattcacacctattaccttcctctgcacatacacattcgttaaaccatatatgtttttgacttatccgcttcgaagagagacactacctgcaacaatcaggagcgcaatatgtcatttctgttacccatccaactgttcaaaattcttgccgatgaaacccgtctgggcatcgttttactgctcagcgagctgggagagttatgcgtctgtgatctctgcactgctctcgaccagtcgcagcccaagatctcccgccatctggcgcttcttcgtgaaagcggtttgttgctggatcgcaagcagggtaagtgggttcattaccgcttatcaccgcatattccatcatgggccgcgaaaattattgagcaggcctggcgatgcgaacaggaaaaggttcaggtgattgtccgcaacctggccagacaaaattgttccgtagacagtaagaacacttgtagttaaaaaatttatctaaacacatatggatttgcacatgtgtttttccgggaggcattatgttactggcaggcgctatctttgtcctgaccattgtattggttatctggcagccgaaaggtttaggcatcggctggagtgcaacgctcggcgcagtactggcgttagttacgggcgtagtacatccgggcgatattccggtggtgtggaatatcgtctggaacgcgacggctgcgtttattgccgttattatcatcagcctgctgctggatgagtccggcttttttgaatgggcggcactgcacgttgcacgctggggcaatggacgcggtcgcttgctgtttacctggattgtcctgctcggtgctgccgttgccgccctgtttgccaatgatggcgcggcgcttattttgacaccgattgtcatcgccatgctgctggctttagggttcagtaaaggcactacgctggcgtttgtgatggcggccggattcattgccgataccgccagcctgccgcttattgtctccaacctggtgaatatcgtttccgcagatttctttggcctcggctttcgcgaatatgcctcggtgatggtgccggtggatatcgccgcgattgttgccacgctggtgatgttgcatctctatttccgcaaagatattccgcagaactacgacatggcgctgctgaaatctcccgcagaagcgattaaagatcctgctacgttcaaaactggctgggttgttttactgcttctgctggtgggatttttcgtcctggaaccgctcggcattccggtcagcgccattgcggcagtgggcgcgttgatattatttgtcgtcgctaaacgcggtcatgcgattaatacgggtaaagtgctgcgcggtgcgccctggcagattgtcatcttctcgctcggcatgtatctggtggtttatggcctgcgcaatgccggattaacggaatatctttctggcgtactcaacgtgctggcggataacggcctgtgggccgcgacgctcggcaccggattcctcaccgccttcctctcttctattntgaacaatatgccgacggtactggttggcgcgttgtccattgatggcagcacggcatctggcgttatcaaagaagcgatggtttatgccaacgtgattggctgcgatttggggccgaaaatcaccccgattggtagcctggcaacgctgctctggctgcacgtactttcgcagaagaatatgactatcagctggggatattacttccgtacagggattatcatgaccctgcctgtgctgtttgtgacgctggctgcgctggcgctacgtctctctttcactttgtaatgagatactgatatgagcaacattaccatttatcacaacccggcctgcggcacgtcgcgtaatacgctggagatgatccgcaacagcggcacagaaccgaccattatccattatctggaaactccgccaacgcgcgatgaactggtcaaactcattgccgatatggggatttccgtacgcgcgctgctgcgtaaaaacgtcgaaccgtatgaggagctgggccttgcggaagataaatttactgacgatcggttaatcgactttatgcttcagcacccgattctgattaatcgcccgattgtggtgacgacgctgggaactcgcctgtgccgcccttcagaagtggtgctggaaattctgccagatgcgcaaaaaggcgcattcaccaaggaagatggcgagaaagtggttgatgaagcgggtaagcgcctgaaataaagcggctatatcccccccacaggttgttagaaaagtgcgctttatttatgtcggatgcgacgctaacgcgtcttatccgatctacaaagtcatgaaaattcaataaattgtatgttatttgtaggcctgacaggcgtagcgcatcaggcgattttgctatttacacattactccctgcgtgagattccaattatcgcgtccagcatggtgtatcagtgagctgcttagtgatcagcgatacagtgcagcagtttaaagacgtactggattatgatttatcagtgctttacacaacaaattattcaataattataagataccttaacccattttattattacacatctaaaacatcacaaaaatatcatttcacacactatcggagaacatcataactttttaaaatgagcgctttttgatagttgttaacgttttcctttacgatactatcaatgcccttttttatacacgaatattaccgggtggagataaaagggaagtcaaaggtaattatatcaggaagatatgnnnntgtgatatttattgtgcgtagaagaaaatccattcctactttaattatccaatttaaaaatcttagcataaaacagataatgaataaggaatgttatgtcaattgactttaccccaggtatgataaatacatatcacggcgatatttataaccgcacaacagataccgacaatgttaaaacaccagacacaccgatgtggccttgtgataatcgggaagaacaacaacccattaattccacattctctggagaaggatacaaccctgaacaatatgatttagcgcggcaacacctcccacaaatttatgcgtgccgcacgaacaccaaatatacagatgcagactactcaaaagttgtggctcaacttgtaagtcttattactaacattgaatcgataagttcgacaccacttacgcggcaggcacaggaaatacttaatcaaattaataacattagatacgaaaagaacaaaagtgctgaatgtcgaatcattgttgtcgctaatcctaaacccgacaaggcaatcataactaaaattagcgtagaagagggaataccagtaagattcagtgtccaaaccatgttttcagatactaattttattgctgaacaacgagctgacttaccgactaatataaaagatattcaaagcctgtatcaaaaaatgacgaagttatatattgagcacagtgaaaataaaaacaggatgaaagtctttgccggaaccaactttattgatttcaatatgacaggacagaacctgtccgggttcgttctaaccttgtcaaggttttatttcgaagatctacttaatataaatttcactgacgcaaatttaggtgacactattttttcacataaagaacaccctactccaaaattatataaagacgaacaatatcttgacaaacaaatcgaaggtttattttcaacattattaaccattaatgacaactttttacgagcaaaagcggaaattgcttcgacaataattaaatttttagaggccaggataaccaatctttcatacaacgacatattgaaatatcagcaagaattccaaaaagaatgttataagcaagttaaatcctttacgacactctctcgatacaataaaattcaaacatgggcagaaatgtctgaatatcaattcgaagtatttcaatacgagacgcttaaccccaaaaaaatgtcacgcacgccttatttaaagaggccacttcctaatgaaaaagatataaattatggggtggaaatagaaataccatctggcaaaagaattcgcttatcaaatcattatcagaatataataccataatattgattattagcactttataatcattgaataaaaatagattttatgtaattttaaaacaaagggttatattatggggcgatggatactcatgccacgccccaaaataacggaattgaactaaacagaagggatataaacatcagacaggtttacgttactatcaggcatatcgcctcagaatcagatgaaaactataaagaaatatctattatggttttaatatttgttgataaggatagtaacatgaacatgacaaaaggtgcactcatactcagcctttcatttttgcttgcagcatgtagttcaattccgcaaaatatcaaaggaaataaccaacctgatattcaaaaaagttttgttgctgttcataaccagccggggttatatgttggtcaacaagcgngctttggtgggaaggttatcaacgttatcaatggcaaaacggatacgttgttagaaatcgctgtattaccgttggatagctatgcgaagcctgatattgaagccaactatcagggccgactgctcgccagacaaagcggcttccttgatccagtgaactatcgtaatcactttgttaccatcctcggcaccattcagggtgaacaacctggctttatcaataaagtcccgtataacttcctggaagtgaatatgcagggcatccaggtgtggcatttgagagaagtggttaataccacctataacctgtgggattacggctatggtgcattctggccggaaccgggctggggtgcgccttactacaccaatgcggtgagtcaggtaacacctgagctggtcaaataacaccaccgaaagatgcagatgctttctcagcatctgcatcatgcattacatcaaattaatacacagtaagctaactattattattataagccctgtcctgttaattacctttggcaaactgattataaagttaatgtccgcaccaggantcggttatgtttcttataattaccagggatacgatgttcttcaccgcgatgaaaaacattctgagtaaaggtaatgtcgttcatatacagaacgaagaagagatcgacgtaatgttgcatcagaatgccttcgtcattattgatacattaatgaataatgtatttcattctaattttctcactcaaattgaacgattaaaacctgtccatgtcattattttctccccctttaatattaaacgctgcctggggaaagtgccggtgacctttgttccgcggactatcactatcattgattttgtcgcactcatcaatggcagttactgctctgtgcctgaagcgaatgtgtcactttcgcgcaagcaacatcaggttctgagctgcattgcgaatcaaatgacaacggaagatattctggagaaactgaaaatatcgctaaaaacgttctactgccataaacacaatatcatgatgatcctcaatcttaagcggatcaatgagctggtacgccatcagcatattgattatctggtgtgaacgattgatcaatataaagaggcccagcaataaatagccagacctcccgttaattatacgttatgcagcaacgccttccggtatcagcgaagcaatttgcttacgccattgcgcttgctcctgttcgccttctgtacgttgaccataaagttgcgctatctgcgtaccatcatgggcaaacaattccagactggttacgtagccatcgctggtcggtttacgggtaacccaggcttcagcaatgctctcttctaatagatgaagagtaaacgtcgggttgaaaatattcagccaacctttcattggcaccactttttctaccacnccggtgaaaatctgtacgcagccacggttgccaacaaacaccatgatttcattaccatcctgctgtgcagattcaagaatttgcgccaacgcactgttggatactttgcaggccaaatcgtctgccaccagattgaacgcctgttggcgcgtcaggttgtggcgcttgagcaacgtaaaaaactgatgaacgtcggtcatcgcccgccactcttgctcgaccacagtggcatcggctcgcgtttgaacaactggcgcatcaacggcttttaactcaagcggcgtattctcatcggtgataaaccgtgccagaagctcactccatgccgccatatcggtattgtcggtggcataaacttttagtaatgcatcgccctgatgatcaaagaactgaatactctggcgttcgccacgagccgtgttttctttgatgtggaaaacactggcccattgattgagaaacagacgtaaatccagcgngcgnnnnttgaggatcaatccggcatgtccgttcaaatgctggtttatgaacgtaccaacttgctcatggactgcatattcattacgacaaatacatttggtttcgccaacactttcgagcgccgccagaatttcacggatatcgccgtgcatccgccacgcatcgtgcgtgacgcgtgcaaatgccagttctgcttctctaatattcattaaccctgcgatgtcacgcgcgtactttccgggattttgttcttttaactcaagccagcgtgtgtagtggttcattgtctctcttccttccagataaatgccccgaaatatcggggcagatgattaccattgataactcacgaaaatttttccgttacgaccatcctgtgggatgccttgcggcgaccagtactctttgtcgaaagcgttacccaacaccaaagtagtggtcatacctttgagcgcctgttgtccttgataactgacgtagaaatcattcacgccatagcctggttgtttgctgtaactgctgctgatatgtgttgagcaatcggcaaacgtaccaacccacccaacagagaagccactgtgagcgatcggaatattcagagtgctggtaacagtatccgggttaatgctggagatgtattcgccggtatcggtgtctttgccgcgggtacggttataggccacatcaaggctaaacagatcagtggtatatttcgtcatcacatcccagccccagattttggcgttcgggacgttatacgacatagtcgtcgccgccgcgaaatcgacggtcgtggagatgtaatccttcgctttggtatcaaagtagctggctttaaattccagagcatcattggacaacatcaggtcatcaaaacgcagcccaaaaccgtactcctgagtttcgttagtttccggacgtaagttcgggtttggcacccaatagttggtatagaagcgaccaatcgagaagtgcttagaatcgttatacatttcgcccatcgtcggggcgcggaatgcctgggcatatgagccaaataacatcagccagttagtcggattgatagtcatccccgcacgagatgaccatttgtcggcatcaacatctttgtaaccgtcactgctaccgcgataactgtcatagcgggttccgccaagcagggtaatcggcagatcgcgtaaggtgatctcatcctgtagccagccggagctaaaatcgatttttgcttgcgggaagcccgtcgtcgcgccgcccggatgttgttcctgacgataatactcaccgccatatgtcagtaagtgagaagcgaaactgtcggcaaagagagtggaacggttctccagcctggctccttttgttatctgttcacgatactcgccggaactccccgtgttttgcgcattaatacggacttccgaccaataaatttttgcatctgcatttaaccagtcgttgccctgcggggcgagtttataagaaagctgcgcatcgcgttgaattgttgaacgatcaaccatcgggttgctgctttcagaagcctcaacggtctgcggattttttggttcacgcgcgtcgttgttgtagtaacgcactaaaccgctcagagactgggctgaatcaatttgccaggtccctttcgccagcatgttattaatggactcgtcattcggcgcggtttcaccattgctctggcgtaaatcaccccgatcgcgactggaccaggccacaataccatccagattttcagttcgcccaaacgcgctcgcgcctaatcccaggctatggtcccccgtgccgccagtaccaaagacacgaaaaccactgctttgtccttcctgcaataaatcttttgcatcgaccgtatcgtaggagatcactccacccagcgcgccactgccatacagtaatgctgaaggtccacgaacaatctcaacacgcttgatcagcgccggatcgagaaaagtgccattcaggtgtccggtatccgttccctgacgaacaccatcgacaagaaccagcacgccgcgatgatcatagccacgcatatttacatcctgaccgttggttcgtccggtaccatccagagtaattccaggaacatgacgcagcagatcggtggctgaagtagccgtttgattttcaggagcggaagtgtcgatgacgctgaccatcataggcgcttcgaaggaactacgggcattccccgttgccgtaacggtcatggtttcagtagcaaaagcaaacgttggcaaggtggcagaaacagctaaggccaataaactcaaacgcaacgaggtaaattgcggacgtgacatancgattctccatgaggaaaataaaaaatgctggctgcctgggttaataccggggtggctggcgaaaaanaaatttatttaaaattcagagcgataatattcgccgggtgagtttacaagcgtttatatcccatgaaattgcctgataactcggcaattacgcaaaagcacgccctctttgtcaggcaaaacgatatgccccatcaggagtgaagagagctgtgcgttatcccttgcaaatgctatggttttgttatccatatggtcgtgttttgttaaatgcaaacgtgataatgagaattattatcgatcaattttttatgatcaagtttttttttaaccaccattaacacaataaacagggggttatgaaacctatcctgcgccctgtaaaccaccttgtttttatggttatccccccatgcctcatcactaaattttgtcgttaacagtgataattttttcttctctttgctctgcaagcctcgatatctctgggttctcagctttttcccgcgatgaaatttagtcggtaacaagaacgttagctgacgaagcatcttgataaaaatcaaaaataaatacgcttgtaacgccttgcgtattgaatcgacggttgtatttcatatataactcaaatgataatcatgatcattctcaatttgataagagttctcatattatgccaaggatcatcaccaggccgtttcttttttccccactgacgttatgtatttcagccgtggcctctgccgcgaagaccgcagtaaaacgtaaaaaattgtttacggcagtactggctcttagctgggcttttagcgtaacggctgccgaacgtatcgtggtcgcaggaggatcgctgacggagctaatctacgcgatgggcgctggcgaacgcgtggttggtgtcgatgaaacgacatcttatccaccagaaaccgccaaactgccgcatattggctactggaaacaactcagcagcgaaggcattttgtcacttcgcccggatagcgtaattacctggcaggatgccgggccacaaattgtgctcgaccaactacgagcgcagaaagtcaacgtcgtcaccctgccgcgtgtgcctgccacccttcagcagatgtacgccaacattcgccaactggcaaaaacgctacaggttcctgaacaaggcgaggcgctggtgacacaaatcagccaacgcctggagcgagtacagcaaaacgtggcgaccaaaaaagccccggttaaagccatgtttattctctccgcaggcggaagtgcgccacaagttgccggtaaaggcagcgtcgcggacgccattctttcgcttgccggagcagaaaacgtcgctacccaccagcagtacaaaagctacagtgcagaatcactgattgcggctaatccagaagtgattgtcgtaacctcacaaatggtcgatggcgatattaatcggctacgttctattgctggaattacccacactgccgcatggaaaaaccagcgcattatcaccgttgatcaaaacctgattctgggaatgggtccgcgtattgctgatgtcgttgagtctttacaccagcagctttggccgcaataaatggatttaaatcagacgaatgaacgcaaataacaccctggatctcacgccacattttgctttagacggtgatcagccatttaaagacaggcgcgccatgatgccgtttcgtggagccattccggttgccaaagagcaactggcacagacctggcaagagatgatcaatcaaacggcatcacctcgtaagcgactggtttacctacacattcctttttgtgcgacacactgcacgttttgtggtttttatcagaaccgttttaatgaagatgcgtgtgctcattataccgacgccctgattcgtgaaatagaaatggaagcggacagcgtattgcatcagtctgcccccatccacgcggtctatttcggtggcggtacgccttccgcactttcggcacacgatttggccagaatcatcaccacattacgagaaaagctgccactggcccctgattgtgaaatcactatcgaaggacgggtattgaattttgacgctgagcgaatcgatgcttgccttgatgcaggagcaaaccgcttctcaattggtatccagtcgtttaacagcaaaatccgcaagaaaatggcccgcacctcggatggcccaaccgctattgcgtttatggaaagcctggtcaaacgtgaccgtgctgcggtggtctgtgacctgctgtttggcctgccgggtcaggatgcgcaaacctggggagaagatctggctattgcccgcgatatcggtctcgacggcgtcgatctctatgcgctcaatgtcctgtccaatacaccgctgggcaaggccgtggaaaatgggcgtactaccgtaccctcaccggcagaacgtcgcgatctttatctgcaaggatgtgattttatggacgatgccggttggcgctgcatcagtaacagccactggggccgtaccacacgcgaacgcaatctctataacctgctgattaaacaaggtgccgattgtctggcctttggttccggagccggcggttcgattaatggttactcctggatgaacgaacgcaatcttcagacctggcatgaatccgtcgcggcaggcaaaaaaccgctgatgttgatcatgcgtaacgccgaacgtaatgcgcaatggcgtcataccttgcagtcaggtgttgaaacagcgcgcgtaccgctggatgaacttacgccacatgccgaaaaactcgcgccgttactggctcaatggcaccaaaaaggcttaagtcgcgatgcttcaacttgcctgcggctgactaatgaaggtcgtttctgggcaagcaatattttgcagtctcttaatgaactaattcaggtacttaatgcgccagcgattatgcgtgaaaaaccataacaggagtgatttatgagccatgtctcgttacaagaatttttgaaaacggagccggacggtacgctggaggtggtagccgaacaatacaacaccacactgctggaggtagtgagaaatctaccctcctctaccgtagtgccaggcgataaattcgatactgtctgggataccgtctgcgaatggggcaacgtcaccacgttagtacatactgccgatgtaatcctcgaatttagcggcgaactgccttcgggtttccatcgccacggctatttcaacctacgcggaaagcacggcatgtccgggcatatcaaagcagaaaactgcacgcatattgccttaatcgaacgtaaatttatgggcatggacaccgcgtccattctctttttcaacaaagaaggcagcgccatgctgaaaatcttcctcggcagggatgaccatcgtcagctcctgagcgaacaagtcagcgccttccatactctggcggcatcgttaaaggaacacgcctgatgacgccgtggctactctttggcgcaggcggaaaaggtgtgggtgccagaacgcttgaactggcgctggcggaacaacgtccggtcgttgctgtcattcgtcatgccgatgccgccacgaaactggcgcaacaaggcgtacaggtttttacaggcgacgcctgtgatgccagcgtagtcgcggctgcttgccgcgcagctggcccggatgcgcttatcatctcaacaatgggaggagctcaggattatctggcgcacagaacagtgattgatgaggccgaaaaggccggcatcagtcgcatgattctggtgacctctttgggatgcggcgatagctggccgtttttatcggagcgggcaaaggctgcgtttggtcaggcggtacgggaaaaaacgctggcggaaagctggctgcaaaccagccagctagactacgccattctccgccctggtggtctgcttgacggcgcagcaacaggcaaagcacaacggatacaaaatcaggagtgtcatggttttgtccgccgtgccgatgtcgccgcacatatccatgaactggcaaatgcgccagcacttaaccagcaggtctacagtctgattgaaccggacctgaaaccggcgtgataccccggcgcggcatgtccgcgccgtaatgtcgtaacggagttttgcgtgctcaaggattcattttcatccgccagggtctttatggggctatcactattattgcttgccctggtgctgttcggtgctagtcagggagcgttaaagatcagttttgatgccctttttgatgaggaataccgcgatatctggctcaatattcgtctaccacgggttttgctggcggtgctggtaggtgcagcgttggcaaccgcaggggtaattatgcaggggctttttcgcaacccaatggctgacccaggattactcggcgtcagtagcggttctgcattaatggttggcgttgcaattgtgctgcccttctccttcccagtggtgctggtgctctatgagcaaatggtgtttgccattgccggaagtttagtagtctgcgccatcatttttctcatcacgcagcgccatcgcgatggcagcatgatgcaattattactcgccggtatcgccatcaatgccctgtgcggcgcagcgatcggcatcctgagctatattggcgatgagcagcagctacgacaactcacattgtggatgatgggcaatcttggacaggcgcaatggccgacgttattggttgccagttcattcatccttccggccattatcgcaacaacttgtctcgccggaacgctgaatttactgcagctcggtgatgaagaagcccattacctcggcgtgaacgttaagcgtaaacgccagcaattactattagtgagctcactgctcgttggtgctgccgtatcggtaagcggcattatcggctttattggcctggtgatcccgcatctgattcgcatgactaccggagcaaatcaccgctggctcatcccttgttccgccctcgccggagcctgtttattgctgatggcagacacgcttgcccgcacgctggtacagccagcagaaatgcccgtgggattattaaccagcctgcttggtggcccttattttatgtggttgattctgcgaaatcggaggatcacatgatcagcgcccagaatcnggtttatagccttcaggggcggcgtctgactgataatgtctcgctgacttttcccggtggggaaattgttgccattctcggccctaatggtgcgggaaaatctacgctgcttcgccagttaaccggctatcttcaacctgatagcggcgaatgtcggttgtttaataagccattaaatgaatggtcgattactgaactggcgaaacaccgggccgtgatgcgtcaaaatagccacatggcgtttccattcagcgtacaagaagttatccagatgggtcggcatccgcatcgtactggtaatcaggataatgaaacagcacaaataatggcgttatgtgactgtcaggcgttagcaaaccgcgactatcggcaattatccggtggtgaacaacagcgcgtgcaattagcgcgcctgctggtgcaactctgggaacctactccctcaccgaaatggttatttcttgatgaaccaacttcggcgctggatattcaccatcagcagcacttgtttcgtttattacgccagttagttcacgagcggcagttcaatgtctgctgcatattgcacgatctaaatcttgccgcgcgttatgcagaccgtgttgtattaatgcaaaaaggaaaggttatcgcaaatggtaaaccacaggacgtattgacacagcaggcgctgacaatgctctacggcgcggatattaccgtacttaaagatcctgccaaccattcaccactgatcgtcctcgatcattaaaagcaacaggagtaccgcactggtactcctgcgaataaataactatacagattagctaattgaaacgcctttcacccctgccataccttttaataatcgcaacagatcttctatcgacgttgtggcatgaagctggatatcaatggcgaccacttcatgatcttcattttcctgcaacgaaactaaatcagtttttattttttgctgcttaaaccagtcgagcattgataccgtattaccgttcactaatgtcagctgtaaatggtaatttttgttcatcaggcggaaggttaattgatggaagacttccagcaccagcaaggtcatcactgaaccataaatacccagttcgtacataccactgccaataaccatacctatggcggcggtcacccagatatccgctgccgtcgtcaaacctacaatattttggttacgaacgagaatgttacctgcaccgataaacccgacgcccgtcaccacctgagcagcaatacggctggggtccagtccgacgtgatctaaagacagcacgtcagcaaaaccatatttcgaaacaatcataaacagtgcgcttcccatgccaattaatacatgagtgcgtaaccctgctcctttgccgcgcatttgcctttccatgccaatagcgccacaggcaattgccgcgagtataagacgtataataaattctgctgtcatataaaaatgcaaaaaggagcagcaagatggctcaacttgccactcctttttacttgtacctcattaattcggcaagtcattagatgcttgatttttgaaggtatacaaatttttctgcgggtttttcttacagtattcgatcactttaggaatttgagtgagatcggtttcatttaaagtaactgtatcgccacctttatatactgtttcttcatgcagcatccaccatgcaaccggggtcattgcttttggattcagatcaataaattcctggcaggtcatatctttagcggattcattggctgccagcgcagattgtgcgttcaccagtgacaaagccgctacagcgcccataaaaataaacgctttacggagagatgaaatattcattttgtaacccattcaatatagagattatatatgaacaggaggaatagctgcttttaaagaagatattccggcctgttcaatatgcaaggaagtacgatgtaacgcattcccggaattacatatctttcttaattttgtcccattcgcctttaactttatctttaaagttggcttgtttatcctgagtacaagcctgaacgatagctggggttacggttgcaataccctgaacatctaaaaccgcatcttctggtttatctttgttgttcagcgcttcagcaaaaccaactgcagttggctggaaggattcgtccacagccaggaaatcttcacaggtccaggagttgaccggttttttgttatcagctgctttttgcgcatccgctgcattgctcacaactggcagaagaagcagaccaccaagaataacgcctaatacttttttcatcgtaatatcctcaactataaagtgaaagagccgtcacgaatcaatttcgacactgaggttataacctggttttctgtatatgtcatgttgatggaaaatatcaaaatcagatatttttatttcaatacaatgagttacagatgcatcagatactgcaattaggaaatttttattaaatcgactgcattcttagacgcgtttttggcatagattgatagcaggggattttcttcttaattttatagggtggttctatgttatatatagataaggcaacaattttgaagtttgatctggagatgctgaaaaagcatcgcagagcaatccagtttattgccgtgctgctgtttatcgtcgggttgctgtgtatcagtttcccgttcgtttctggcgatattttaagcacagtagtaggtgcattattaatctgttcgggcattgcgcttattgttggattattcagcaaccgcagtcataatttctggccggtattatccggtttcctcgtcgcagtcgcctatttaatgatcggctatttcttcatccgcgcaccggagctgggcatttttgccattgcggcatttattgccggtttgttctgtgttgcaggggttattcgcctgatgagttggtatcgtcagcgttcaatgaaaggcagctggctacagctcgttattggtgtgctggatatcgtcattgcctggatattccttggtgcaacgccgatggtgtctgtaacgctggtttccacactggtgggaattgaactgatatttagcgccgccagcctgttcagcttcgccagtttgttcgttaagcagcaataattatcccggttgtcacccggatcatagtcacttgatgtgactatgatccgattaatactctctccgctacgcagtgttgtagatcaattgcgcactatcattgaaataattacctgctagtgattatttcaacctactgaatttcatctaatttttttcactccatggcaaattagccatttcaaacattatcatggctgatattttccgtagtcaggtttaatgttttaaaagtgctgtgggaaagtgaacaaagagttccgtaagcgttgatgctatgggcggttaaataagtaatccgggttcatttttttgcaactggcgttgattacattgcataaatatccatgtctccagacgctatataaaaacctgaagacatgaatgcgttatttactcaggtaatttcaatgcgttaaaagaaagctggcaatccaattgccagcttaagtcgaaacaaggagactcgatatttaaatcggattactttttaactttagtaatattcttcagagatcacaaactggttattgataacttattcttgggcagtaatccgcaaacgttaactttttgtttactatttacaagctgataacaaccaggaatcttacttaggatcaatatatggagtgcgtgatggataaatctgaagtattgattagtgttaatagacgtattagttcacgaagagcaaagttcttataggcgtttactatattgaacaacgattcggacaaggatgtaaataatgaaaaggatgacatgttcgaaacgataacggctaaggagcaagttatgatttttctcatgacgaaagattcttttcttttacagggcttttggcagttgaaagataatcacgaaatgataaaaatcaattccctgtcagagatcaaaaaagtaggcaataaacccttcaaggttatcattgatacctatcacaatcatatccttgatgaagaagcgattaaatttctggagaaattagatgccgagagaattattgttttggcaccttatcacatcagtaaactaaaagctaaagcgcctatttattttgttagccgcaaagaaagtatcaaaaatcttcttgagattacttatggtaaacacttgccccataagaattcacaattatgtttttcacataatcagttcaaaattatgcaactgattctgaaaaataaaaatgaaagcaatatcacgtcgacgctcaatatttcgcaacaaacattaaagattcagaaattcaacattatgtacaagctgaaactaagacgtatgagcgacatcgtcaccctgggtatcacatcttatttttagtcaggacataagcaactgaaattgatggctggcatgacgagggatgcagatgctgatttcattacccccggtgattactaaaggagaggctaaaacgactttattcccctggtatgtgtatccaccagtagaacccttcgttgcccgaatgctggcaggaactgttggcagaacggcaacattttttttgtcgttgacctcaccatgtcgatcactatgcctgtatcccaccttactggctgacaaccccactatgccgctggtctgtaaatccctcatatctctcctcgcgcgcaatttaaagaaccgttatttctcaagaattttcagggactaaaatgaacagaagaagaaagctgttaataccgttgttattctgcggcgcgatgctcaccgcctgcgatgacaaatcggcggaaaacaccgccgccatgacgcctgaggtcggtgtcgtcacactctcccctgggtcggtcaatgtgttgagcgaattgcccggtagaaccgttccttatgaagttgccgagatacgtccccaggtgggcggtattatcattaaacgcaactttatcgaaggcgataaagtgaaccagggcgattcgctgtatcagattgatcctgcacctttacaggccgagctaaactccgccaaaggctcgctggcgaaagcgctctctaccgccagcaatgcccgcatcacctttaaccgccaggcatcgttgctgaagaccaactacgttagccgtcaggattacgacaccgcgcgcacccagttgaatgaagcagaagccaatgtcaccgtcgccaaagcggctgttgaacaggcgacgatcaatctgcaatacgcgaatgtcacctcgccgattacgggcgtcagcgggaaatcgtcggtgaccgtcggcgcactcgttaccgctaatcaggcagattcgctggttaccgtacaacgtctggacccgatttatgtcgatctcacgcagtcggtgcaagatttcttacgcatgaaagaagaggtcgccagtgggcaaatcaaacaggttcagggcagtacgccagtacagctcaatctggaaaatggtaaacgttacagccagaccggcacgctgaaattctccgacccgacggttgatgaaaccacgggctccgtgacgttacgggcgattttccccaacccaaatggtgacttgctgcctggcatgtatgtcacggcattagtggatgaaggtagccgccagaatgtattactggtgccgcaggaaggcgtcacccacaacgcccaaggtaaagcaacggcgctcattctggataaagacgatgtcgtgcagctacgcgaaattgaagccagcaaagccatcggcgaccagtgggttgtcacctctggcttgcaggctggcgatcgggtgatcgtttccggtttgcaacgcattcgtccgggtatcaaagcacgagcaatttcctccagccaggaaaacgccagcaccgaatcgaaacaataacgttgcaggcttaaggggactttcatggctaactattttattgatcgcccggtttttgcctgggtacttgccattattatgatgcttgcaggtggtctggcgatcatgaacttaccggttgcgcagtatccgcagattgcgccaccgaccattaccgtcagcgctacctatccgggtgccgatgcgcaaacggtagaagactcggtcactcaggtgattgagcaaaatatgaatgggcttgatggcctgatgtacatgtcttcaaccagtgatgcggcgggtaatgcctctatcactctgaccttcgagactgggacatctcctgatatcgcacaggttcaggtgcaaaataaactgcaactcgctatgccttcattacctgaagcagtgcagcagcaggggattagcgtcgataaatcgagcagtaatatcctgatggtagcggcgtttatttctgataacggcagcctcaaccagtacgatatcgcggactatgtagcgtctaatatcaaagacccgctaagccgtaccgcgggcgttggtagcgtacagctctttggttccgagtacgccatgcgtatctggctggacccgcaaaaactcaataaatacaatctggtaccttccgatgttatttcccagattaaggtgcaaaacaaccagatttctggtggtcaactgggtggcatgccacaggcggcagaccagcaactaaacgcctcgatcattgtgcagacgcgtctgcaaacgccggaagaatttggcaaaatcctgttgaaagttcagcaagatggttcgcaagtgctgctgcgtgatgtcgcccgcgtcgaacttggggcggaagattattccaccgtggcgcgctataacggcaaacctgctgccgggatcgccatcaaactggctaccggagcaaacgccctggatacctcgcgggcagtcaaagaggaactgaaccgcttatcagcctatttcccggcaagtctgaagacggtttatccttacgacaccacgccgtttatcgaaatttctattcaggaagttttcaaaacactggttgaggctatcatcntcgtcttcctggtcatgtatctgtttttgcagaatttccgtgccacaatcatcccgacgattgccgtaccggtggttattctcgggacgtttgcgatcttgtcggcggtcggtttcaccatcaacacgttgactatgttcgggatggtgctggcgatagggttactggtggatgacgccatcgtggtggtggagaacgtcgagcgtgtcattgcggaagataagctaccaccgaaggaagcgacgcataaatcgatggggcagatccaacgtgcgctggtcggtattgccgttgttctttccgcagtgtttatgccgatggcctttatgagcggtgcaaccggggagatctaccgccagttctccatcacgctgatctcctccatgctgctttcagtatttgtggcaatgagcctgacccctgccctgtgcgccaccattctgaaagccgcgccggaaggcggtcacaaacctaatgccctgttcgcacgcttcaacacgctgtttgaaaaatcaactcagcactataccgatagcacccgctcactgttgcgttgtaccggtcgctacatggtgatctacctgctgatttgcgccgggatggcggtgctgttcctgcgcacgccgacctctttcttaccagaagaggatcagggggtatttatgaccaccgcgcagttaccttccggtgccaccatggttaacaccacgaaagtgctgcaacaggtgacggattattatcttacaaaagagaaagataatgttcagtcggtgtttaccgttggcggctttggcttcagcggccaggggcaaaacaacggtctggcgtttatcagtctcaagccgtggtctgaacgtgtcggtgaggaaaactcggttaccgcgatcattcagcgggcaatgattgcgctaagcagtatcaataaagccgtcgtcttcccgttcaacttacccgcggtggctgaactgggtaccgcgtcaggttttgatatggaactgctggacaacggtaacctggggcacgaaaaactaacccaggcacgaaacgagctgttatcactggcagcgcaatcaccgaatcaggtcaccggggtacgcccgaacggcctggaagatacgccgatgttcaaagtgaacgtcaacgccgcgaaagctgaggcaatgggtgtggcgctgtctgatatcaaccagacaatttccaccgccttcggcagcagctacgtgaacgacttcctcaaccaggggcgggtgaaaaaagtgtatgtccaggcaggcacgccgttccgtatgttgccggataacatcaaccaatggtatgtacgcaacgcctctggcacgatggcaccgctttctgcctactcgtctaccgaatggacctatggttcaccgcgactggaacgctacaacggcatcccgtcaatggagattttaggtgaagcggcggccgggaaaagtaccggtgacgccatgaaatttatggcagacctggtcgctaaacttccggcaggcgtcggctactcatggaccggactgtcgtatcaggaagcgttatcctcaaatcaggctcctgcgctgtatgcgatttcactggtcgtggtgttcctcgccctcgccgcactttatgagagctggtcaattccgttctcggtgatgttggttgttccgttaggcgtcgttggcgcattactggccaccgatctgcgcggcttaagtaatgacgtctacttccaggttggtttgctgaccaccatcgggctttccgccaagaacgccatcctgattgtcgaatttgccgttgagatgatgcagaaagaagggaaaacgccgatagaggcaatcatcgaagcggcgcggatgcgtttacgcccaatcctgatgacctctctggcctttattctcggcgtgctgccgctggttatcagtcatggtgccggttctggcgcgcaaaacgcggtaggtaccggcgtgatgggcgggatgtttgccgcaacagtgctggcaatttactttgttccggtctttttcgttgtagtggaacatctctttgcccgctttaaaaaagcgtaacgtgtaaatgagagtaaggttgaacgtgaaggttcagccttactctttcctgctaaccattcaccactcaacaaccagctaaccgtcaggaataccaggcttagtacacagcactgaaagtagaaaccactccagccattcgtcatcaatttgaacagcacaatactgacccacattcccgtaatcgtatgaattgtcagcttaataatcccaaacatgccgagtcttttcctcctgaaaatacctataccgcctggcaaactgcgaaagagaactagccggtagcccggcagaaatcatcagggaagagtttcacatgaagcaggtgtgagatcctgaccaatattcaaatgcaaaatatgtcaggaaaaggtacctggcgaatgttgcgcaaactgatgtggcgttacaccataatattgtcgaaatgtgtttataaagtacgacgtactgctatagccacatttttccgcaatagtatgcagaggaatttgacgtaactcgagtaatcgtctggccatcgacatcctggaggcgagtaatattttactgaaacaggtgttttcatcctgcaacttttttttgatgagactctcgctggtatacattctttccgcgatatcgcgcagataccaacgtttggcgatatcaaagctaataaggcgttcaacttttcctgaaacagtgctgatgctattgaaaagtaaggggatcagttctttcttatgagaaaacatcgataaacaggaaaggtagagcatattgctcagtatcggtgaatttaccccggattcattgaagctatcaaaaatcgccgtcaccagcggcatggggggtgactggttaattaacagacggtctttgctatgtaaccctaaattgcgtggtagctgacgaatattttgtaagtaatggcaaactgtcagctcatcgatatccagtcgtcgcgtatccggtgaacaaaacgcaaaatcgtctgccaaatttttctccagcagcaggatactctcgttatgcagcgatattttttgctgttcatgataaatatcgaatgaacgacgaatgaggatcaccgagcagacatgagtcatgattatcccttatatttcatactgcgattatttcaatttcagtatactaatgaaatgatgccagactgtttcttagcgcaaaaactgccaaannnggtaggaccaaaatttatccacaaagtagttttgcataacagttaattgataataagtaaatgcaacacgaatatattttcgcacagcgtatagcttatgtttataaanannnngctgatcttatttccagtaaaagttatatttaacttactgagagcacaaagtttcccgtgccaacagggagtgttataacggtttattagtctggagacggcagactatcctcttcccggtcccctatgccgggttttttttatgtctgagtaaaactctataatcttattccttccgcagaacagtcagtgccgtaaaaattcccttgcgcaacaatacttgccgccgagtcacggttcggcaatccctgcgccgatcgctcctgatactctgtgggcgtcatcccataataatttcgaaagacgtaaatgaaatacgacacgctgtgatatccacaggacactgcgactcgcttaattgaaangccatgtataacaataagttgcaaagcacgttgcattctacactcagtaagcaactgtgaatatgatgtctcttcttcgcgcaattttttctttaacagacttggactcatcaacagctcgctggcgattcgggctagtgtccactcatgagcgatattattattgataaccgtacaaactcgtgttcgcatgttcggttgtaaaacgttcagaagcagcggtataaagtgatcatcctcaagaaaaacagataacaacgcaaagattaatgctcttttacgtagcatttctgcatagcgaagattcttattctgcgatagttgnnnaacttcctgaaaaacaggaatatctctgctacagtgatgaacgagtaatgaagaaacttttttatgtgcatgaagatttaatgcctcctccttgagcatcgggagaaataatgaaagcgtatcccttgatactaatacaaaattttcaacacacttatctactcgaatttggcttgcatccgcaaaaaccaggtcaccgccattaaaatagcgatattcaccattaaccatggtgagaatatatttatgtcttgcgtacgcaattagacaattcccatgtaatgattgcatagttgacttaatattacataaacatattactgtttattaatgtagcacgccgccctcttaagtcaaattgattgataaataaatttaaacgaagcgggagaacaggatgataatgtgtgatgttctacgggcaggatgactggatttataatacaaaaacgtgtttaagaacgcagggaaattaatagtaagcaaataatcccttgtcgtgacattaaaggtaatcgctacatttaataaacattcatataacatatatcttatcaacacgatgaatagacagccaatatattattgcgattaataagcaaccgaatgcccagctgttttttttaaaggctgggcattcggtttttacaacgttatgttatcaggtgtgtttaaagctgttctgctgggcaataccctgcagtttcgggtgatcgctgagatatttcagggaggctttgtagtcttccagcaacagttcagcaaagtccatttcgaagccgcgacgacacataatgcgcatcaccacgatgtcggtggcttcaccgccgagagtgaaggccggaacctgccagccgcgcagacgcagacgttcagagaggtcgtacagggtgtatcccggatcttcaccctctttcagtttgaagcaaaccgccgggatgccttcgtccggacgacccgtacagatgaactcatacggccccagtttggcgatttcatccgccagataagcggcaacctggtaagaggcgttctgtactttggtatagccttcacgaccgaggcgcaggaattcataatactgcgcaatcacctgacccgccgggcgggagaagttgatggcgaaagtaccaatctgaccaccgaggtagtcaacgttgaacaccagttcctgcggcagcgcttcttcatcacgccagataacccagccgcagcccagcggagccagaccgaatttatggcctgaagcactgatcgatttcacacgcggcaggcggaagtcccagacgatatccggggcgacgaacggtgccaggaagccaccgctggcagcgtcgatgtgcatgtcgatgtcgataccggtgtcggcctggaatttatccagtgcatcgtgcagcggttgcgggaactcatagttaccggtgtaggtcacgccgaaagtcggcaccacgccgatggtgttttcgtcgcaggcttcaatcatgcgtttcgggtccataaacaactgaccggggcgcatagggatctcgcgcagctccacatcccagtagcgagcgaatttatgccagcagatttgcaccggaccgcacaccaggtttggtttatccgttggtttgcctgcagcttccatacgcttgcgccaacgccatttcatcgccatcccgccaagcatacaagcctcggaagaaccaatggtgttggtgccaacggcctgaccatttttcggcgcaggcgcatgccacagatcggcaaccatgtttacgcaacgcaggtcgatggctgcggattgcggatattcttctttgtcgatccagtttttattgatcgacaaatccatcaatttatggacgttttcgtcgtcccaggtctggcagaaagtggccaggttctgacgagcgttgccatcaagatataattcatcattgataatctggaatgcgacatcatcgcgcatttcgtgcagcggaaatcgttttgactccgcgatagtagaaatggcctttgcgccaaaacgtgaatcgagtagttctgagcggaaatccgttaacagcttctggtccatttcgaactccttaaatttatttgaaggcaataaaaaagtaggatttatccgcaatggaagcaaggcattacaggcttaatttaaataacaaaatcctaagcagaaaaatgannttttannatataaacatttaatatgataatattaaaaacagactttattatcgtaataaaaatcgcccaaacattcctgttcgggcgatcaaattaattattgtttatcctgcatatacggcgtgtaaaccccgttcagactgtgcaggaaagctacgatatcatccacatcctcctgcggcagctctttgcctacctgatagcgcaacatcagtttcaccgccccgtccagcgtcggcacgtcaccgcgatggaagtacggtgccgttaaagcaacgttacgtaaaccgggtactttctgacgcaatttatcacgctcttctttagtcacattcatacgaccaatatccgccnccgtaatttccccaaagttaaagtcttttttcagccccaacggttcgaaggaacgtccgccgagaataattccaccatgacaagttgcacatttattatctttaaataattgatagccttttttctgttgcgccgtcagcgcattttcatccccacgcaaccatttatcaaatggggaatccggcgtaattaatgttttctcaaattcagcaatggcatcagtaatattttcgccactgaaaccttgcggatagacgtcgaggaactgcgctttaagctgcggatctttttccagcttagcaataatttcgtcccaggattttgacgccatttcaatcgggttcaacggcggtccaccagcctgatcctgcaatgttgccgcacgaccatcccagaactgctcaacgttaaatactgagttaaataccgtcggcgcgttaatcggcccaactgcgccaccaacaccaatcgatgtttttctgccatcgacgccccccgcattcaacgcatggcaatgagcgcatgaaatggtgctatcagccgataaacggggatcgtgatacagcgcaaagcccaacgccactttttgcgcatcggtaggcagtttttgcgggatgggctgcaccggttcattgcgatgctccggagcagtatcattgctggcgtaatattccgcgcgctgttttgcaatccaggccagtatttccgcccgctcttcatcactcaccttacccgcccagtgtagcgcggtataacgcgttggcggcatagtttcatactgcatcacccattcaatcttattcagatcgctttgcgaaacgggtttatcagccagcagagcagcacgcacggcctcgaggttaaaagatttatatccaagcttaatgtcgtaatccatcaactgtttcgcgccaggaatataataataggcgggtaattctgccgaaggcgtgtggcaatagtcgcatcctttttcgcggagaaagcctaaaaccttattattttcactgacagcagatgcctgaacatcggcctgtttactgcgtttattatcgtggtaccacacataaccagataaccctaaatagcaaatcgcgacgccagccaggccgatcgcggtaatacgtgagaccattttcattattcttccctcacggtggtgagttattgtgacccagaaaattttccagaatgctgcaaacgtctctgcgagacaaagccatcataaaaaacagggagatacgctttttgataggaatcaatcaattacatgaatataaactatcaataagatagcctgtgcctattacccagatcaggaatggcatatcatgattgcggcaagagcaggattgaatgttctgaaaatgaaaaacaacacgaaatctgtatttttataaattccattgatattagtgcgttatattttttgacaggttaataaacgtgatccaccgcacgctttgtcgcccaccaggcggagcgaatgactacccttaaagaaaagcccgataattagcgacgaatttcggaggttggatccttatgctcaatcagaaaattcaaaaccctaatccagacgaacggatgatcgaggtcgatctctgctatgaactggacccgtatgaattaaaactggatgagatgatcgaggcagaaccggaacccgagatgattgaagggctgcccgcctctgatgcgctgacgcctgccgatcgctatctcgaactgttcgagcatgttcagtcggcgannnntttccccgacagtaaaacctttcccgactgcgcacccaaaatggacccgctggatattttaatccgctaccgtaaagtgcgccgtcatcgtgattttgacttgcgcaagtttgttgaaaatcacttctggctgccggaggtctactccagcgagtatgtatcggacccgcaaaattccctgaaagagcatatcgaccagctgtggccggtgctaacccgcgaaccacaggatcacattccgtggtcttctctgctggcgctgccgcagtcatatattgtcccgggcggccgttttagcgaaacctactattgggattcctatttcaccatgctggggctggcggaaagtggtcgggaagatttgctgaaatgcatggccgataacttcgcctggatgatcgaaaactacggtcacatccccaacggcaaccgcacctattatttgagccgctcgcaaccaccggtttttgcgctgatggtggagttgtttgaagaagatggtgtacgcggtgnnnnnngctatctcgaccacctgaaaatggaatatgccttctggatggacggtgcagaatcgttgatccctaatcaggcctatcgccatgttgtgcggatgccggacggatcgctgctcaaccgttactgggacgatcgcgacacgccgcgtgacgaatcctggcttgaggacgttgaaaccgcgaaacattctggtcgcccgcccaacgaggtgtaccgcgatttacgcgcgggggcggcctccggttgggattactcttcccgttggctccgtgatactggtcgtctggcgagcattcgtaccacccagttcatccccatcgatctgaatgccttcctgtttaaactggagagcgccatcgccaacatctcggcgctgaaaggtgagaaagagacagaagcactgttccgccagaaggccagtgcccgtcgcgatgcggtaaaccgttacctctgggatgatgaaaacggcatctaccgcgattacgactggcgacgcgaacaactggcgctgttttccgctgccgccattgtgccgctctatgtcggtatggcgaaccatgaacaggccgatcgtctggcaaacgccgtgcgcagtcggttactgacacctggcgggattctggcaagcgagtacgaaaccggtgaacagtgggataaacccaacggctgggcaccgttacaatggatggcaattcagggatttaaaatgtatggcgatgaccttctgggcgatgaaatcgcgcgcagctggctgaagacggtgaatcagttttatctggaacagcacaaactgatcgaaaaataccatattgccgatggtgttccccgcgaaggcggcggtggcgagtatccgttgcaggatgggtttggctggactaacggtgtggtacgccgtttaattggtttgtacggcgaaccataatatttttacagccagccgctaacttcctgctggctgtaaaattatcctcttcaggaggagatatttaacatcattgccgcctgggtgcgatttttcacttccagacggcgatacagggattccagatgcgcttttaccgttccggtactgatattcagcgctctgccgatctccttatttgattcgcccgccgctaacatggttaaaatctcccgctggcgggcgcttaacgatttgagatctttaatgtccttttccggcgtcgtccgccagtctccaggcagaaacatcntccccatcgccgcactatttaccgccaacgcaaatgtctcgacggttgaatcacgaggcacaatggccagcacattaaaatggataacttcctgtaaccaccgtttattgcagtccgtcgccgtaattaacaccttaacctcaggaaattgcaccacggttttttgcagcaaccagtagcaaaactcaccatcctgatcgccatcgagcataactaaggcttcagggtaactttccagcttttgccataactcgtctgcctgactggccccctgaatactcactcctggaatacgctgctgtaaactgattttcattccatgaataaatattgactgcctgtcaaacatgactatttgcataactgaatctccacctgaatacgttaaaaagacttaagtagtggaagggtattacccgcgagaaaaaataagaattcgccatttggcggtggccattctacagagatggcgcgtagaaaatagttaccgatataaatagttacagctaaacgcctgaaattacatgtcgagggcactatttaaaacaattttgaggatttccttatattggtggttagtacgcatgcaattaaaaatgaaattccgcgaccacaagccaaaataacaaatggcaatgagacaaaaataagcacaaatagccaatatgtcctctattcactttaaagggaatcgctgaaaaatacgctctgtttaaggggattcacctttctcagaaagctattccgcccttttcctgctgagaaatcgccacattcgtcatgacaacattgtgaaacccggcattagatgttagaaaaaataataaacaatgcgatatgcgcgttactgtttcgctgtgaacaacaatcggtcaaagaaatggataaaattcacgcaatgcagttgttcatcaaagtcgcggagctggaaagtttttcccgcgcagcggatttctttgctttgccaaaaggaagtgtttcgcgccagatacaggcactggaacatcaacttggcacccagcttctccagcgcaccacgcgacgggtcaaactcacgccagaaggcatgacctattatcaacgagcaaaagatgtgttgagtaatctcaacgaactggacggtctgtttcagcaggatgccaccagtatcagcggtaaattacgcatcgacatcccgccaggaatcgcaaaaagcctgttactgccgcacctgtcggaatttctctatcagcatccgggaattgagctggaactgagtagccatgaccgtccggtagatattcttcatgatggttttgattgcgtgatacgcactggcgcgttaccggaagatggcgttatcgcccgtcccctcggcaaactgaccatggtcaactgtgccagtccgcactatctgacgcgctttggttatccgcaaaaccccgacgatctcacttcacacgcaatagtgcgttatacaccgcacctgggtgtacatccgttaggttttgaggttgccagcgttaatggcgtccagtggtttaagtctggcggcatgttgacggtaaacagtagcgaaaactatctcgccgccggtcttgccggtctggggattattcagatcccgcgcattgccgtgcgcgaagccctgcgtgccgggcggcttattgaagtgttgccaggctaccgtgccgagccgctctccctttcgctggtttatccgcagcgtcgggagctttcccggcgtgtaaacctgtttatgcagtggctggctggcgtaatgaaagagtacctggactgaccgactatactttttaagaatgaccacgacagaaggacaaaagagcggatgacgcaggaaaacgagatcaaacgtcccacccaggatctggagcacgagccgattaagcagttggataatagcgagaaaggcggcaaagttagccaggcgctggaaaccgtcaccaccactgccgaaaaagtccaacgccaaccggttattgcgcacctgattcgcgcgacagaacgctttaacgatcggctgggtaaccagtttggtgcggctatcacctatttctcatttttgtcgatgatcccgattttgatggtgtcgtttgccgcagggggctttgtgctggcctcccatccgatgttgctacaggatatcttcgacaaaattctgcaaaacatcagcgatccgacgctagccgctacgttgaaaaacaccatcaacaccgccgttcagcagcgtacgactgtagggcttgtcggcctggcggtggcgctttattccggcatcaactggatgggtaacctgcgtgaagcgattcgtgcccagtcgcgcgatgtctgggaacgctcgccgcaagatcaggagaagttctgggtaaaatatctgcgtgattttatttcgctgattggtttgttgattgcgctgattgtgacgctttcgatcacctcggttgccggttcggcgcagcaaatgattattagcgccctgcacctgaacagcattgagtggctgaaaccgacgtggcggttgattggcctggcgatttccatcttcgccaactatctgcttttcttctggatcttctggcggttgccgcgccaccgtccgcgcaaaaaagccctgattcgcggaacatttctggctgctattggttttgaagtgattaaaatcgtgatgacctacaccctgccatcgttgatgaaatccccctctggcgcagcatttggttccgtgctggggctgatggcatttttctacttcttcgcccgtttgacgctgttttgcgcggcgtggattgccaccgccgaatataaagacgacccgcgaatgccggggaaaacgcagccttaaaataggccggatgcagttcaaaacgccttatccggcatacgaatttattcggcctggctccccgtaggccgaataagatgcgccagcatcgcatccggctataatgcgcacataacctcttgaaactctttcccagagcctcttcagccatctattcaggagcaaacaatttcatgccaactcataaccccagcatataaatccagatggtaacttttatttaacctgaaaccagttttatccactatttataaaattatgtgaagcatttcatagaagaaaaatcactggcctaaacattatcccctttttgcctggtttttgaccatttccgcgatttgttacacattgaaatatcacttttgctgtgcgtaatatggctattcgttagccaaaaaataagaaaagattatgcaagcaacagccacaacactcgaccacgagcaagaatacacgccgatcaactcgcgtaataaagtccttgtcgcctctctcattggcacggccattgagttcttcgacttttacatttacgccactgcggccgttattgtgtttccgcatatcttcttcccgcagggcgatcctacggcagcaacgctacagtcgctcgccaccttcgccatcgccttcgtcgcgcgccccattggctctgccgtttttggtcattttggcgatcgcgttgggcgtaaagcgacgctggtcgcctcgttgctaacgatggggatttcgaccgtggtgattggtctgctgccaggctatgccacgattggtattttcgccccgctgctgctggcgctggctcgatttggtcagggtctgggcttaggtggtgaatggggcggcgcggcgctgctggcgactgaaaacgccccaccgcgcaaacgtgcattgtacggctccttcccgcagctgggcgcaccgattggcttcttctttgccaacggcactttcttgctgctttcctggctactgaccgacgagcagtttatgagctggggctggcgtgtgccatttatcttctcggcggtgctggtcattatcggcctgtatgttcgcgtgtcgctgcatgagtcgccggtgtttgagaaagtcnctaaagcgaaaaaacaggtgaagatcccgctgggtacgctgctgaccaaacatgttcgcgtaaccgtactgggtacgttcattatgctggcaacctatacgctgttttacatcatgacggtctactctatgacctttagtaccgccgccgcgccagttgggcttggcctgccgcgtaacgaagtgttgtggatgttgatgatggcagttattggttttggcgtgatggtgccagtcgctggattactggctgatgcctttggtcgccgtaaaagcatggtaatcatcaccacgctgatcatcctgttcgcgctgttcgcctttaacccactgctcggttctggcaacccgattctggtttttgccttcctgctgctggggttaagtctgatgggtctgaccttcgggccaatgggtgcgctgttaccagagctgtttccgacagaagtgcgttacaccggagcatcgttctcttacaacgtagcgtcgattctcggggcttccgttgcgccatatatcgcagcctggttgcagactaactacgggctaggtgcggtggggttatatctggcggcgatggctggcttgacgttaatcgccctgctgctgacccatgagacgcgacatcagtcgttgtaataagagtgaaaagcctgatgcgctacgnnnnnnaggcctgaatttccatacaatatattgaattcgcaaggatttgtaggccggataaggcgttcacgccgcatccggcatgaacaaagcacactttgccaacaatctaaatctgtttaattgccggatgtcagacatccggcaattatcttcacttcttcatctgcgacaaaatcgtccggcactgattagcctccccttcggaaggtgagatcagtgccagcaacgctgccgctggcgtaaccagcgttgccagtgccgcagcaacagcaccacgggcaatcaacggcccggctttcaccccagcctgaggatttttaaacgtcccacgcacatacagcggcgaacgcagtgtgataatccgaatacctttactctccggatcaatagtcaaatccagctgttccgaagcaaaacttgccgtgccggtaacgttaatcaacgcgttctcagtatcgaaagcaaaaatctgcgggcgtgccacgccgttggcaatattcagattcgccgccgcgcagttcacccgcacctcatcgtcaccaaatatcgcaccgacaatgtagttgccgacattcagcccaacaatctccatcaggttgcggctcaccagcccgtcattcatcaacagtttcaggttgccgttactgttgcctaaaagtgccgccaccgagttaccgctaccgcgcagttccgcgtcaccgttcatttcccccagcgtcttctgcatcagttccacatcgggcatcagttctttcagtttcagtcgacgagcctgaatatctgcccgcccctgcatcggctttttatcgccttccagatgaatattcgccgcaatgctgccacccgcaatgccaaatttcagcggttgcaggcgcaagtcagcatttttgaggatgatatgagtagaaagatcgctaatcggcaggctactgccatgctcaatgcgccgccctttgaagcgaacatcggcatccataacgtcccatttatcggtttcgaagcggtcataaggcagcactttgcccgcaggctgaacgcttttttcgcccttcttctgttcagaccgtttcgacttttctgcccctttcccggaatcaacgccaatcaacggtcccaggtccgccagccgcaattgccgcgactcgacatcaccttccagttttggtcgtggcttgccggtggtgtagaccagagaaccgtggatatcgctatcgccaattcgcccattaaagccgcgataatcaaagaccgacgatttttcagtgtcgattttcgctaccagccgaccatccgtttcaaacggcggggtatcgggcagcagaacgcccgtcagttcatagagatcacccagtgaatcgccagaaaatttaagccgtaaatcgacaccgcccatcttcattgggtcattcacgacgccntcaaaagcaacacgggtattacctgaacggaaatcagcctgtaccggaaacggcgtcccttcgccacgcagcgccagcataccgcctatttttcccgtacccgtgagcggttcaccgttataacgtccctgcgccttcaggccaaaaacgtaatcgcccaccttttctttatccgctttacctttcgatccagtaacttcgctgaacggcagcggcttgcctaagggatcaacaaaaatctccagatccgctttgcttactttgtcatcaatggcgatccgcccttgatcgaaaagaatattatccagccgaaacgaccatgccgacggctttgcattcgcgtctttgttatcatcgttggcgagattaaacgtccagttattgttcttttcagagaggcgaatcaggcgcgcgtcgggcttttcgagcttgatccacggcagccagaccgttttggtcagcagcgccagcggggccagcgttgcttctacgcgtggcaaatgcaccatcgtgacttcgggaatatccggtggattgccaagaatgatgtcttccgcgtgtacatggggccacggcacccagctgcgccagccagtttcttgcttttgccgctcccacaccacgcccagatcgccacggatagcgaacggacgattcaactccgcagagactttctggttgatggtcggtttgagtcgattccagtcaaaagttgcaatcaaaatgatcgccacgacaatcaacaacaagaaagcccctgaaatcgcagcggttattttgcctgccttgctcatcgttcgcttcctcatattcttcctgtgccagtcctaaagatagtccagccaggcggaaaatgaggcagcttatagcgccagaaccgccgtattcagcgtttctatcggtgccgggcgtgaaagaaaccagccttgtgcggcgaatgcgggcgagttctgtacatcacgccactcttccggcgtttctacgccctcgacaatcaccccgcgacaatagcgattcattagatgtaaaagctgagaaaagagtgtgcgtccttccggcgactgacgcagcatcacaaacagttctcgcgcgattttgatgtagtcataacgcacttcacttagtgcagagaaatttgccatcccggtaccaaaatcatccagccacagcgggccaaattcacacatcgaggcaaaggttgaatctttcggcagacggatatgctccaccagttcgaaacgcagccagggaagacgctcaatctggcgcaggatttttggttgctgacgcagggcgatgagcgtaggaccatcaatattgaccgatgccagcaggccgtgctctataaagaagtcggctttttgcgccagcaaatcaatctgctctttcacaacctccatccgatggctgacggtgatttcagtaaaatagcgatccggcggcaggcgttgcgaagggttcaagggatgcgtgaccgccgttaatagctccacggccattaaccgcccgcatgtttgatagatcggctgccaggtgtaagcacgctcacactgcaaccaaaaacgccgttcctgcaagctctcgatgcttgcttcagggttgcttattcgctggataacctgccttatcatcaaagatgtcctgtgtttaaaagtgatgcagcccagactcgacaaagattatcggcgcgcaagggcagaactttaccgcctggccggggtaaatttccccactccacaacggaatctttcaggaatacgttctggctcaaaaaaataatggaacactgttttaatatggttgaccagcaaaccaccacagcgcaaactaacgctaattttttacagatcaggttcacgactatgtccaaaaagattgccgtgattggcgaatgcatgattgagctttccgagaaaggcgcggacgttaagcgcggtttcggcggcgataccctgaacacttccgtctatatcgcccgtcaggtcgatcctgcggcattaaccgttcattacgtaacggcgctgggaacggacagttttagccagcagatgctggacgcctggcacggcgagaacgttgatacttccctgacccaacggatggaaaaccgtctgccgggcctttactacattgaaaccgacagcaccggcgaacgtacgttctactactggcgtaacgaagccgccgccaaattctggctggagagcgatcaatccgcggcgatttgcgaagagctggcgaatttcgattatctctacctgagcgggattagcctggcgatcttaagcccgaccagccgcgaaaagctgctttccctgctgcgcgannnncnnnnnnnnggcggaaaagtgattttcgacaataactatcgtccgcgcctgtgggccagcaaagaagagacacagcaggtgtaccaacaaatgctggaatgcacggatatcgccttcctgacgctggacgatgaanacgcgctgtggggtcaacagccggtggaagacgtcattgcgcgcacccanaacgcgggcgtgaaagaagtggtggtgaaacgcggggcggattcttgcctggtgtccattgctggcgaagggttagtggatgttccggcggtgaaactgccgaaagaaaaagtgatcgataccaccgcagctggcgactctttcagtgccggttatctggcggtacgtttgacgggcggcagtgcggaaaacgcagcgaaacgcgggcacctgaccgcaagtaccgttattcagtatcgcggcgcgattatcccgcgtgaggcgatgccagcgtaaacgcagcatatgcaaaaggctggataaagagttacccctctatccagctcatccataaatacctgatggttgtgctaactcatcaccatcaggcattactgtgcaggtggaatatccgtcacttcaggatgtacgtcatccgtggcgacagaggtggtcgcagcggcggtagatggggccatgatttgatcccaggccgcctgcaacgctttcatgttaaattccggctcgcctttcggctgcagcagtattaacgccatatcattcgacaactgctgacgcagatcctgatttaacatctccacagtcaggctgttaaggaaatcctgccgcagtttctgatactgctccggcgcgatatcgacgacctgattttgcaacgaacgcatccgctggcccatcagaatatcggtatcagcccgtgcataggcggcaaacagtttctgcagctccagtttcttttgcgccactaacgcattgaactcttcttccggcagacctttatcgcgaaccttcgccagttcacgcgccaccagattaaggttgctgttcagcttgtcgtttggtgattcgatgttgatggcacactgcgcacgcagatacagcacacggcagtcaaatccaagaccgatgtctttgctgttactggcgcttaacgcttgctgaacatgccagaacagcgcctcacgggccaggtccgcacgccagtagcgcagcagtgcggctgattcacgaatcggctgccacggcgtatcccacatgatagataaccggtcctgacgcaccgcgtcagtcataatactcaccgcttccgcacgcagcggagaaagcgtcggcaccggagccggtgtttcacgtttgcctttcagttcgccaaacgttttgttgatttggtcgacgaccgagcgcgcatccacgtttcccaccaccagcagcgtcattgcatccggggtgtaccatttctgatagaaatctttaattttttccgcttcaacgggttgtttcagcggatcggcaggatcgtgacctaacaaggttgaccctttcagacgatagcgccaccagccctctttagtatcggcaggccaggttgccaccatgtcctgactttgcagcgcgtggttgatggtttctggcgtgatagtcagtttgccagtggcatttgccagataagagagcgcctctttcagcaaatcgttacggttattgggcaaactcagattaaacagcgtggtgtcataagagacaattaccggcggcatcgggcgtttagggtcgatcccctgctgccacaatgaacgcgcctgtgctgcgtcaaggccaccgctttgcgttagcgcaatacgagggatggcgtgactgtaaccgctctgttgtgtactttcggcgagcgaaccggtattaaccagcaggcgaatttcaacacgatcgctgggacgctggggggtggtcagcacttgccactgtaaaccgttggaaagcgtcccctgttgccatgctggatcaggctggagcgcatctgcctgcacatagccagcagtggccatcatcagcaaaccgcccgctaaaagtcgaatttttgtgccctgcatgtgaacccctgatcaactatcctggtaataaaaaaactgcccgttgtcggtcagtctaaatgacgttaaaaacacttcgtgttagaccgcaagaacatgaaaatgtcacggaagaagtgaaataaacctgaactcacccaggtggtaagttcaggcacaggggtcaattatgcgcaaacacccgcactcggggaagggagtgcgggcataagtgatgagattaagaggataattcgtgcgttttgccatccggcgcacgattattcagcacatcgtccagttttttgtggtccagttctttcacccacttagcaacgacaatggtcgctacgccgttaccgaccaggttagtcagcgcacgagcttctgacataaagcggtcgataccgaggatcagcgccagacccgctaccggcaaatggcccaccgcagagagcgtcgccgccagcacgataaagccactacccgttacccctgccgcccctttagaagaaagcagcaacacgattaacagcgtgatttggtggacgatatccatctgactgttagtggcctgggcgataaacaccgccgccattgtcaggtatatcgatgtgccatcaaggttaaacgagtagcctgtcgggatgaccagccccaccaccgatttacggcagccgagtttctccatcttgtcgagcatacgcggcagcgccgactcggaagatgaagtccccagtacaatcagcagttcttcacggatgtagcggataaatttgaagatactgaaaccagtcgctttagcgattgaacccaataccagcaccacaaacaggatacaggtaatgtagaaacagataatcagctgccccagttgcaccagtgtgccgacgccgtatttaccgatggtaaacgccattgccccgaacgcaccaataggtgccagacgcatgatcatattgatgatgccgaagatgacctgcgagaaactttcgatgacgttaaaaatcagttggcctttgctgcccagacggtggagcgcaaaaccaaacagtacggcaaacagcagcacctgcagaatgttaccgctggcaaatgcgccaatgacgctcgccgggatgacatccataatgaaggcgacaatgccctggtctttcgcctgatcggcgtaaaccgctaccgctttcgcatcaagcgttgccggatcgacgttcattccggcaccaggctgcacgacgttaacgatgataagaccaataatcagcgcgatggtactgacaatttcaaagtaaagcagtgcgactgcgccggtacgaccgaccgccttcatgctttccatgcccgcaatgcccgttacgacggtacaaaagatgacaggagcgatgatcatcttaatgagcttaacgaagccgtcgccaagcggtttcatttgctcgcctatttcaggatagaaatggccaaggagaataccaatggctatcgctgtcaggacctgaaagtaaaggcttttaaacagagaggttttcatagggtgtcctttagtaaaaccacaggtcttgtaaggttatggggtacctgcggccttaaaataacacccagacaacatcacagaaatgtacctggatcataattgaaacaaaaaggttaaaaagtttgagntggntcgcacaaaccagcactttttaaagttttgtaatcagtttggggtagctacttttcttccaggtaactctcttcgaagatttcaatagggagtggacgagcaaaaaggaagccctgggcaataccaacgcccgcttttgccagccagtcgcgttgtgcttcagtctccacgccttcggcaatcatttgtaagttcaggctctgcgccagcatgataattgcagcaatcatgctgctatcttccggcaagccttcaacaaacattttgtcgattttcagaacgtcgattggcaacgatttcatatgctgcagctgacgcagccctgcgtagcccatgccgaaatcatccagcgccacccgaactccggcattacgcagcggacggaggattgccaccgcagcatgagggtcgtcaatacgtcggctttctgtcacttccagaatcagtgttcccggctgaatgcgatagcgggttaacagttccagcatatccgccaccatattcgggtgcatcagttgcagcgcagagaggtttaccgacaagggcagcataatgccgcgctcttgccaggctgcaagcaatcgacaggactcttccagcacccagtgaccgacggtaaccatcagcccacagcactcaatgcgatcgattaagccatccggcaggtcccaactgccatccggttgctggatacgcagtaacacttccgcactgaccagtttaccgctggtcatctcgacctgtggctgtaaccaaatagcaaactgatgattttccagtgcattaaggatatcgctctcttccgtcaaccgcttctgggcggcttccatctgctgcggatcaaagaactgaatctgattcttgcctttatggcgagcggtaaatgccgcagaaatagcgcgactgtaaagctgttcggcggtgagatcgccgtagaacatcgccacgccaatgctacagtgcggacggagttgaatacgttcaatcggcaggcgctcgctcatgatagtgagcacttgctgacccaaagtgattgcgtgccacggttcatgtacaccgttggcaatgacagcaaagtcataaccgctaatctgcgcgaggatcatacgtggcgacagtaccgatttgagtttttccaccagcgtcagcagcagaatttctcgttgcgcctctttcagcacgcccgcagtatcacgcagagtttcacaggtgatgatcatcagcgcggtggtttgtttacgcgcgacaacctgctccagcatctccatcagcaaggctttgttcggcaaatccgacaccgggaagcgcatcgcattttcgttctgttcttcataatggcgctgcagcaattgctggttgaggttgtaactgcgcaccaacataccgatttcatcgtcctgatgcagacgcggtaatgccagttggtgaccaacaagctcctgggctgggatggcgttaagttcgcgagcaatattgcgtaacggatgcaaaatcaggcggttaatgcaccagctaatcgccaccgtcaatattaacgacaaaagtaagtaaatggtcactaacgttgagagggtgctcatcacgaacttatacatacggaaggaatccgcctgtagcaccagataggcaattggctgcggatttgccggacgttcgagcgagtagacgcccancgagatttgaaccggtagctcaaacaggcgagtaaccattaccggcaccggacgctctggaataaaacttttacgcagcgcctggaactggttaggcagcactacatcggcacggctgaccacgcctgccggtttaatgctggcaagaatagcttccgcttcgggaatatcacctttcaaaatggctgaagataaaggttcgcggacagagcgagcaatgctttccagttgcgtagccgtgttatagcgattctgctggaccagatggaacagcaaaacggtgcaaaaaataaaaacgaacaccaggacaacggctgccaccattgccatctgcttgattgttaacgagcgacttacgcgcaaattgtctccccccggaaatcccagattgccgcccgagtatacccgatcgcagcggcattaagagaggcgctatctgaaaacttaccagtcggcgtaaggtatcagcggctgcggcggtaaatccatgtcaccctgccatccggcggcggaataacgtacgtagagcaggaaatggctgggggcgtaatctttcgcctgctggatatcaattgccgtgccgacaaaccagttggaagtaacacgtcgttcaagtaatgcccgcgccgtatagccgaagccctgactgctgccgccatcgttggattgccgcgcagcttcttcctgccagtcggtcgggatcagattcatcagcggataacgcggcatggttttggtgcgtgaatgcgaccacgagccagacgcccccagctcccacgaccagttttccgtgcgctcccgccacatcaccggtatggcaaacgacaggtattcctgcgggctgtagtaaccgccctgaccgagtgagtagccactcaggtctttgtcgtaatgccagatcatgttgttcaggccgattgtgacgcggcgattgttctggttgatgaccttatagtaatagcccgtcatccagcgcacacgccagttatcttcgacatttttaccggttaactggtcgccactaagcgatgcccagacgccgtttgcttcacctttatcgtagctcaggcttagccccacgccgtcggcacgcacgccgccccattttttcccggtattgctcggggagtctttttgcccaccaaaggccagcaaagaactggagatgggacgacggtgggcgttaacggtgtaacccagcggcccgatatcatcgctgtaactgatgccgccgaccacatccaccacgttgaagcccatcggcgtggtgccgatatcccagctccagacgtcatttcgccagccgaccgccacgctggcaccggaatccgactggctgcggttgccgctacagtcctgtaatgtacaggtgccccagttgtcatcccatttgccatcggcattagtggagaaactgccgacgttcatattgacgaaatcactgcgaaagaacatccgcccgtcagaatacggcgcatccacctgcaacatggtagtgtgcgctttcagatcggagtaaccaccggtgccgctcgaaccccaataatcatgctcgagggtgacgttaagatcctgctggcgatagaggtccgccgcatcgctgcgcacgccgcgtttcagccagtcatctttctcgtcgttacgggtcagtcgggtaaaggtgtcgttatcctgcggacgcgtcgtagtcacaccggatgcgaccatggcgtctttgtaggtttccagcgcctgctttggatcgcccgcctgcgcttcaaacttcgcaccgtcgcgcagcaccatcgcgctttccatcgacggtggctgagattttgcctgcgggatcaacttattaaacgtctgctgcgccgctgcggtatctccaagctgcgcctgcgccagcgccacgcgccgctgtgtgttcagcgaggcgttatcagtagcgggcagtttcgccagctggctacgtgccgccgctgtgtcaccggcagcaatatccacttccgtcagaccaagaatggcatcggcgttagttggctcccgcgtcaggacattctgatatgcagcgcgggcggcggtgtaatcacgtcgctgcagcgcccagtcagccagcgtgaggtcaatacgcgtggaaggtggttgctgacgcagcatcgcttccgcttcagcttctttgccgctttctcgcaggcgattagcggtttccagcacctgatcgctttgcagtcgattaaccagctcctgaatattgctgctccactgcgcacgcggcaggctgttgatatgcgccagcgccgctctgtcctggtcatgaccagagaggtacagcccgtaagcgtaaacctgctccgggtcgttcggcttctgctgcgccagattgcgcattaacgtatcggcctggctgcgttgtccggcctgccagagatcctgcgaaagtcggtaagtaatccatacgctgccggggtccagcgccagtcgttgccgctgaagtgctgccgcctgcgcccatttgccctggttttccagtgcctctgcctgctgtgccagacggtcgttttgcaggctgcgttcgatatcatcaatgctacgccgctgactggcagagagtgaggcgataaacgcttcagctttttctggcgattgctggcggtaaatatttgccagcccgcgcacggcgttagtgttgccgctgtccatacgcaaggtctgctgataataacgttcggcggcgggataatcttttcgcgccatcgccacatcgcccagccccagcactgcataactgtcggtgttatcgacattacgcgcctgctggaacaggcgttctgcccggtcaggattattggctttcagcgcagcatcgccctgctggatcgccagccagtagcggtttactttcagcagactgttccatttgtcgttgttgctgctgtgcggatccagtgcgagggcttcttccagattcgccactgcattggcgcgatcgcctttctgtgaatatgcctggcccagcgcccccagagcttcactgtctttcgggtttgcccgcactgcctgttgtagttcgggaatggctttacccgccataccagagtccaccgccgctaaaccttgcgcacgagcgcggaaagcaggatcggccagctgtttttgctgttctgccagttgcgattgcgcagccgccacgctatcgccatcactaaagatagaaagatattttttcagcgccgacacactggcatcactgacgggcatgtctttaatctgcccgtaccagattttagaggccccttcgcgcccggcgttcgatttcgccatctgttccaggacggcaaaaccttcgtcacggcgatcgctactaaacagcaatagcgccagattgttttgcaggcccgtattgcccggtgcatccgcattgatgcgttttaactgattaatcgcttcgccacggcgagccggaattttcgccaccgtactccagtactcgacagcaatgtcaccttccggcggcgcaccgttgaacngttcgccacagcttcttccgcatgaccggtagtcgcctgcaatcttgcctgttgcagtgcctgacgaccatccggcgtggaaagtagcatcgtagtccgcgacgatttatacgcatttgaactcggcgctaactgcgacagccgatcgagctgtttttgcgcgccatcaatatcgccctgacgtaacaaagaacggaaacgggcggcaacgacgtccgggttattcggatcaataagttccagccgatacaacgactgctgcaccaggtcttcacgatgggtcgcttcgcctaaccgaacttgctccagcaactgttgctgagcggttggtgctgcctcgaccatcggcatgacggccagaccgagggaaagcgtgaatatgtttagtgtgaatttgcgcattcctggccccagtcaggtaataactcaccttttgtcgagaagcggaaacggtgttgatcccagccttgtccaaacagggtcagcacatagttgtaataggcatcgctgccgggaaagttatcggccacgcgctggcgctgaacggcctgcgcatcacggttttgtaaaaagggcagcatggcggcagaaaaaccgaccggtcctttaccctgcgctttccccgtagccacatccactttttccggcggataaccgtttttctcagtgaatgtcgccatcggtttaaaccggttgagcatccgcgctttctgcggatcgctgtcaggcatcatgcctacccacatgtaaacgcggatagcgtcgtagctgctgatcaatgttttttcggcttttagctgccagcctttgtctttctcatagcgcacccagtctggcgaaaagcctttcggggcggtttccagcaataaacgttgattggtttcgcgcagcgtagtccacggcgcnnnnaagcgggtgaaatactgcgccagcgtcggcggcaggtagctggggttaaaacgccagctgttatcctcagcaaaacccactttgcccggtaacaacatggaacccagcccaggcaccgtcaccacttcctcccgcgcaatacgttttagcaacgcgctgccgatgtcggtataacgctgntctttccacaaacgccccgcctccagcaacgaccaggccatccagacatcaccatcggaggccgaattgctgtccagcacttcccacttactgttctctttcttgccccacagccaggcgggcaaacgttcttttaaagaaccctgagcgagattgttctgcgtccagtcgagaatattatcgaaagctgcacggtcgttagccgccagggcaaagaacatgccgtaactttgcccttcagaggtggtgattttgcgcgcgtcgctggggtcgatgacgcgcccttcctgactgatgtaatcctttttaaactgctcccaggcaggccaggtacaggctgcctgaacactaaaggcagccaacagcagcatcgtcacgagtccactacgcaacacattcatcttcaattactcgttatccgggttaagacgacgacggctgataatacgcagcaaacgccacagtacccatgccagcaatatcacactgatagccgccagcaccgccagcagaatcggatggtttgccagcgcataccacaagcgctcgaaccacggcagatgacctacgtaataaacgtcgccaacacgtaggctgttgataccggactcgcggatcaccgcgaccgaaccgaacatggtggcgcgtttgccgctatcgttcaccgcatcgttaagcatttcataaccgcgtgggctatctgccagcagcgcaatcacgctgcgctggtcgttatacggcgactggaagccaatcaccgccgccatcgcaccggaagaggtcagcgttgactgggtttctgccgcncgatcgctctcgtccggcacaatgccggggaacggggtctggcgcatcggtgttttcacccagctttcggtcgcctgcaccaataggtcgatctgcttatcgtctttcagtttgtccgggataccaccgatgatcatgatgtcggcatctttgccctgaatggtgctgccatcatcggtcaccgtcagattaatcgccgggaagcccgtctgtgcgccgataaaaccaacagtattcagcaacgtttccatctgtgcttcgttaggcgttttcggcatcacggtgatggtttgcgacagatccgccatccggctgaacgggaagcccgcgttagcaaaggcgcgtagatccggcatcgggatgaagtggtaatacttcgagaagtcgatggtggagtcgtcaccaatcaccacatgattctgcaccggctggaaggtaatacagttatccaccgaaccgccaggcatcgggttcatatactcaaagtcgaagcgcagctggttggtcgcgcccagtttcagcgccggaatagagacatccgttttgccatccagcaaaccttgtaataccggaatccgcagcagcaggcggttcgcctcctgtttgctgctcaggttgaaggattgcaggaactggttattcaggctgatatccatccgcgaactgtctttcaccggcggcatggtgtagcggtaattaatatccatatcaatgccggtactgcgcatcaggtagagatctggcggcaggtttagcgaaacattaatcgctgctggctcaagaccgctggattgtaactgttcttcataggttttcagttcaccaaaggtgaccggacgatcggtacgcacccagttcggcgcatcgtacggcttacgcggtagcagcggtttcacttcattcactaccacgctttcaccacggaacagaatgttaccctgagcgatacctttcgctgcctgcaacaggtctttgtcgtcacgaccaaacaccaccagcagtttgacgtaaggattctgcggatggttaatcatctcaatcaccggggcttttaccgccggatgatcgcgcaggaagtccggccgtttgtcgttggttgcaaagacaatggcattacgatccggcagttggttatagagcaccgggaagttctgcccacgccagccagaacgcgaaccaaaccacgaggcgacaatggcagatgcttgttgcagcccaacatccggcgcacccgcaaagaccatcggcaaggtgttggtgcggttatcacgcgggtcaaagaatggcaccgggaagtgtgacaggtcattcttcacattcagggtctgataggtcagatccagtccactgctccgcccaacatccagccaaagcgtggtgctggccgggttttcgcacacgtcctgataatggccgacaaactccagccgcacacggttgaagtcggtaataaacagtggattaatgggcatttgcgccagcgtttttttacccaactgttctttggtcactggcagcacgcccatcagctcatcattgagataaacctttaactgcgactggacaggcagtaacgatggcgatggcgtgtattcgaggttgagcatcgccttcgtcaccacttcatcgctgcgcataccaaactcaatgctgccgttcgggttaatgccacgtancaccatgctgcccgnnnncnnnnnnnnntncgcaaaggtcagcttcacatcacgcgaaggaccgttctgcgccacgactggcgcatcagcgccctgcacgcccggcatcacttgccccacctgcggattttgttccgtctgggcggctacagctggctcagcattgatcagtggttgcgttgctggcgtcgcctgcgtcatgaaagangggaacgcactcatccccatagccactgcacaaatccagaatagttttcttttcatcgcgttatcatcattgttgagccaaagcctgatccgatggttgtgccgtttcgctccgctccgggcggcgcggaataaacgatacaacccaggaaaccagagaagtcagcacacggaatatgcccttcaccgaagaaggcgcaaactccgccagatggcggtagccacggaagccgagcttcagaatatccagcagactttccagcggcttatcttccgggtagctgtcctgccagagcgcccatgtatccgcacgggcaaacgtacactgcacaaaatcgatatgttgctgggtggtgagcggcattaatttcagcccaacttcattacccatcacgcgcgccacctgggtcgggaagacgtattcctgctgaccgcgtttaagcaacagattcactttctgcccttccagaatctgcgcctgaccgttgatcttgatccccaaaccaccgtcggagaaatcctgaacggtacacgagaagaggtgaccatcttcgcgggcaattgccgcgggcatcgtcatctccacgcggtgcgatcggcgtacctgtttgctttctaccgataccgcaactgcgccgccaagaacaatcaggttgtagaatacccacaccatactgacgaccacggtgagcatctcggttggcgggccatagaagtagcgccagatgcctaccgcaacgcccaccaggttgagcagaacaaggaagatgtagggccgcgagatcacccagtcgacgtactcttcttccaccagtccacctttggcggtgacgttaaatttgcctttgtgcgggttaatcagcgccaccagcgtcggtggtgcgatataccacgccagcaccgtttcgtagatttcactccagaaagagtggcgatatttgccctggatcttggagttggtcaggctggcatggatcatatgcggcagcacnaacagggcgatcatcaacgctggcgcatagatgatgtaggcatgaagcagcaggaacgccagcggcgcagtcaggaagatcagccgtggaatgcccgacaagaagtggaacatggcgttgacgtagcacagccgctgagcaaacttcagccctttaccggtgagcgggttatcgagacggaagatttgcaccatcccgcncgcccagcgaatacgctgaccgatatgcgccgacagactttcggtcgccagccccgccgcctgcggaatacgcatatacgcggaggtatagccacgacggtgcaaacgcagagaagtatgcgcatcttcagtcacagtttcgacagcaatgccgccaatttcatccagcggcttacggcgaatcaccgcacaggaaccgcagaagaaagtggcgtcccacatatcgttgccatcctgcaccagaccatagaacagcgtgccttcgttcggtgttttacgaaaacgccccaggttgcgttcaaacgggtcnggcgagaagaaatggtgtggggtctgcatcatcgccagctgtttctctttcaggaaccagcccacggtcatttgcaggaacgatcgcgttggtacgtggtcgcagtcgaaaatcgacacgaactcgcctttggcatatttcagcgcattgttgatgttgcccgctttcgcatgttcatgagtggtacgggcgatatacttcacccccacgttttgcgcaaactggcgaaactcttccctgccgccatcatcgaggatccagatgttcagcttgtctttcggccagtcgatacccagcgaggcgtaaatggtatttttcaccacgttgagatcttcgttgtaagtcgggacaaagatatccaccgacggccacagcgacatatctttcggcaatggcaccggctgacgattcagcggccatactacctggaagtagccgagcaccagcacaatccacgcgtacgtttcagcgaagagcagaataagcccgcacaccaggctgaccggatcgtcccagttcagcgtagaggtatatcgccaccagatataacggcaagaaacagtcagcgacagcacaatcaacattagcgctgagaagcgccccggcatccgccgtacgatcagcgctancccccacagcagcatcaggaagataaactgcgccagcgggttaaacggctgagtaacgcagattaacgccagaatcagcgagaaggtgacgatgataccgaggatcaaccgccgcgccccggcactcaaatgaccgagctcttttttctcatcaagatgctgtgttttatggctaacgcgctcaggcagctcgttcatccattgatggtaacgtccacgaatattctgcagacctgaaaatgcccgcctgcgcggtttcggcgtttctttgcgcgatgcaccgatcagtaaccagcatgtttgaatgagataacggaccgggtccagcggacgcggacgcgaggcgttgatatgcggatacaggtttttatgttctgcgcgaatacgctgccagcgcgggtgctccagtggaataaaaatccaggccaggatcatccagaaacagccgagcgtcgcgctgaaagccgacgcaccgtgacgacgataatcgcgataacgcccgataagccgcgcgttgaccggcgggataagcaaccaccgggtcaggatactcatgatgcactcccgactggcgttttcagcccggaatagttcaacaggcaccagttcgccagcgtcaatatctcttcagccgccagcgcatcactgcgatattcacctactggttgcttagccgccaggcattcagccatcgcttcatcacgatgaatgagcatcggcagtaatcggcgctggctttgcaaccaaagctggtaaatatcgtcctgaacctgactgccaatacggaagttattaatcaaaatatgtgcgccatccggcagcgcttgctgatgcagtcggatatggcagttggcatccacattgacgattgccagcgagtgatcgcacaaactcagcagctggtgggttatctgcgaggcatcacgcggtaagtcgattaaaatccactggtaacgcccgctggcttttagttgctgtaagccggagcaaatatcgctcagccgggtttgccagtgctgtggattttcttgttcttcaatggataactgaccaaaaggcagcaaatcgagctgcgaggtgtagcgcaacccagcgtcgcgccagtcctggccatccagcatagctctggcccagccctgacggtgggtaaaatcaacattaaatgacaggcgcaacaagttgtccgggcaggcatcgaccaccaggacattttctcccaacatttgtaatgaccaggctaatgcggcggtgatggttgttgtccccacgcctccccgcaccccctgcaatcccagtacggccattcaccaatcccctacttttgttgcgcaaactctgccagcaacggccagcgttttaatgccncggccaactgttcgcgttgggaaatatcggcataatcaatatcaggcagtgaaaatgcctgctttaacgccaaaatatcattctggaagatatagcctatcgcgggatcaggcagagtatctggttcattgttattcattttgcttgatccctatgaaataaccgtaccgttcatgagacaattctaaccgtgagcatttcgccggtttattgtttacggcgagacgggaatttgctcactttttgactttccgttacgcaacagaaaaagttaaaaacgaaaagactaaaatcacacgtcttgtgacctgctaaattgattcacatgctaaatctgataagttttaatttcaatggtaggtttatttcttagctttcgctagtaaactgataatcagacaaaatggtgacatgagggacattgtggaccctgtattctctatcggtatctcatcattatgggatgagctgcgacatatgccagcaggcggcgtctggtggtttaacgtcgatcgccatgaagatgctatcagtctggcgaatcaaacaattgcatcccaggctgaaaccgcacacgtcgcggtcattagcatggacagcgatccggcgaaaatctttcaattagatgattctcaagggccggaaaannnaaaattattttcaatgctaaatcatgaaaaaggtctatactatttggcccgtgatttgcagtgttctattgatccccataattacctttttattcttgtttgcgcaaataacgcatggcaaaacattcctgccgagcggctgcgctcatggttggataaaatgaataaatggagcaggttaaaccattgttcgcttttggtaattaatcccggaaataataacgataaacaattttcattgttgcttgaggaataccgttcactttttggtcttgccagtttgcgttttcagggcgaccaacatttgctggatattgccttctggtgcaacgaaaaaggggtcagcgcccgtcagcagcttagcgttcagcaacaaaatggtatctggacattagttcaaagcgaagaggcggagatccaaccacgcagcgacgaaaaacgcattctgagtaatgttgctgtactggaaggtgcgccgccgctatcggaacactggcaactgttcaacaataacgaagtcctgttcaatgaagcccgtaccgctcaggcggcgacggtggtcttttctttacagcaaaatgcgcaaatcgagccactggcccgcagcattcataccctgcgtcgccagcgcggtagtgcgatgaaaatcctcgtgcgggaaaataccgctagcctgcgcgccaccgatgaacgtttgttattggcctgcggtgcaaatatggttattccgtggaatgcgccactctcccgttgtctgacgatgatcgaaagcgtgcaagggcagaagtttagtcgctatgtgccggaagatatcactaccttgctgtcaatgacccagccgctcaaactgcgtggtttccagaagtgggatgtgttctgtaatgccgtcaacaacatgatgaataaccctctattacctgcccacggtaaaggcgttctggttgccctacgtccggtaccgggtatccgcgttgaacaagccctgacgctgtgtcgccctaaccgtaccggcgatatcatgaccattggcggtaatcggctggtgctgtttctctcattctgtcggattaacgatctggataccgcgttgaatcatattttcccattgcctactggcgacattttctcaaaccatatggtctggtttgaagatgatcaaatcagtgccgagctggtgcagatgcgcctgcttgccccagaacaatggggcatgccgctgcctttaacgcaaagttctaaaccggtcatcaatgccgagcacgatggtcgccactggcgacgaataccagaacccatgcgactgttagatgatgctgtggagcgctcatcatgatgaccatcagcgatatcattgaaattattgtcgtttgcgcactgatatttttcccgctgggctatctggcgcggcactctttgcgacgcattcgcgacaccttacgtttgttctttgctaaacctcgttatgttaaaccggctgggacgttacgccgcacggaaaaagccagggcaaccaaaaaatgactcaatttacgcaaaataccgccatgccttcttccctctggcaatactggcgcggcctttccggctggaacttctattttctggttaagttcggcctgttgtgggcgggatatcttaacttccatccgctcctcaatttggtgtttgccgcgtttctgctgatgcccattccgcgctacagcntgcatcgcttgcgccactggattgccctgccgatcggctttgctttgttctggcatgacacctggttgcctggcccggaaagcataatgagccagggttcgcaggtggcggggttcagtaccgattatttaatcgaccttgtcacacgctttattaactggcagatgattggggccatttttgttttattagtggcctggttattcctgtcacaatggattcgcattaccgtttttgtggttgccatactgctatggctgaacgtacttaccctggcgggaccaagtttctccttgtggccagccggacaaccgacgaccactgtaacaacgacgggtggtaacgcagcggcaaccgttgcggcgacgggtggcgcaccggtagtgggtgatatgcccgcacaaactgcaccgccaacaacggcgaaccttaacgcctggctgaataatttctataacgcggaggcgaaacgtaaatcgaccttcccgtcttcgctgcccgctgatgctcagccatttgaactactggtgattaacatctgttcgctttcctggtcggatatagaagccgctgggttgatgtcgcatccactgtggtcgcatttcgatattgagttcaagaactttaactccgccacctcctacagtggcccggcggcgatccgtttactgcgcgccagctgcgggcagacttcgcacactaatctgtatcaaccggcaaataacgactgctatctgtttgataacctgtcgaaactgggctttacccagcacctgatgatgggacataacggccagttcggcggttttttgaaagaagttcgcgaaaatggcggcatgcagactgaattgatggatcaaacaaatctgccggttattttgctgggctttgatggttcgccggtttatgacgataccgccgtgcttaaccgctggctggacgttaccgaaaaagataaaaacagccgtagtgccacgttctacaacacgcttccactgcatgacggcaaccattatccgggcgtcagcaaaacagcggattacaaagcgcgggngcagaaattctttgatgaactggacgccttctttactgaactggagaaatcgggtcgtaaagtgatggtggtcgtggtgccggaacacngcggcgcgctgaagggcgacagaatgcaggtatctggcctacgtgatatccctagcccgtctatcaccgacgtccccgttggggtgaaattcttcggcatgaaggcaccacatcagggggcaccgattgtcatcgaccaaccgagcagcttcctggctatctccgatctggtggttcgcgttcttgatggcaagattttcaccgaagacaatgttgactggaaaaaactcaccagtgggttgccacaaacagcaccggtctcagagaactcaaatgcagtagttattcaataccaggataaaccgtacgttcgcctgaacggcggcgactgggtgccttacccgcagtaagcacgaaaaaggccgcagagtttcccccctgcggcctggtccgggcgcaaattgccattacggcagcctgacgcccgcatgacacgttacttccgcttgttcagccagttcacgatcatactggcaagaatgccagcaatgaccggagccgctaaatcatgccagaaggccatgcccagctctgcgagcgtcatatagccgcctgtgttgtaatgacaacgtttcgcggctattcttgagtggtctaggttcaagattagcccccgtggtgttgtcaggtgcatacctgcaacgtgcgggggttttctctctccagcaaccaatgccaccagggattaagcccccgcaacattgcgcctcaccggaacccttccggcttgccgctaattttacgattgctttttactgtcagcactcggcaatcttcctcattgcgtgatgccttccagcttaatttcttaatttgcaatagttgcagttcatatccgggctgactccagactggtagtgaaatgcgcaattttgtagaattgcgcctcctcgcgacctccccagtgaatctgttgcctcattttttacatactgcgtattcgacttctccacctgttgcgcaagagaaactgggtttattcatttttgcgaggccgacttctttctggacaggactttatgcagcacaacacactaccgaaacacgatcagaaattgccgtttacacgctacgacttcggctgggttttattatgcataggcatggcgattggtgccggaaccgtgctgatgccagtacaaattggcttgaagggcatttgggtatttattaccgcagcgatcattgcttatcctgccacctgggtagtgcaggacatttatttaaaaaccctttctgaaagcgattcctgtaatgactacaccgatattatcagtcattacctggggaagaactgggganttttcctcggggttatctactttttgatgattatccacgggatttttatctactctctctccgtggttttcgacagcgcctcgtacctgaaaaccttcggtttaaccgatgccgatctttcacaatctctactttataaagtcgctattttcgccgtactggtagcgattgcgtctggtggtgaacgattactgtttaagatttctgggccaatggtggtggtcaaagtagggattattgtcgtgttcggttttgcgatgatcccgcactggaatttcgccaatataaccgccttcccgcaagcctccgtcttttttcgcgatgtcctgcttaccattccattttgcttcttttctgcagtatttattcaggtacttaacccaatgaatattgcctatcgtaaacgggaagcggataaagtactggcaacccggctcgcgctgcgtacccaccgaattagttatatcacgctcatcgcggtgatactgttttttgccttttcgtttaccttctcaattagccacgaagaagccgtttctgcctttgaacaaaatatctcggcactggcactggccgcgcaggtgatccctgggcatatcattcatatcacctctacggtgctgaatatctttgccgtactgaccgcattctttggcatttatctcggtttccacgaggccattaaaggcattattctcaatctgttaagccgaattattgataccaagaaaattaactcacgcgtgctgactctggcgatctgcgcttttatcgtcattacgttgacgatttgggtttcgtttcgtgtatcggtgctggtgttctttcagttgggaagcccgttatatggcattgtgtcgtgcctcattccgtttttcctgatctataaagtcgcacaactggaaaaacttcgcggatttaaaacctggctgattctgctttacggcattttgctatgcttgtcgccactgttgaagctgattgagtaaaccggagcgcatggccccggttttgtgagttaacgctgcggattttcatcctgatcaacagcaaaacaagctaccagttgaccgccgtagtcttttagctgcggctgcaactgggtgcaggggccgaagcgccgacgacagcgggcgttaaacgcgcagcccggcggtggattcagcgggcttggcagttcaccggtgagtttgatgcgctcgcggcgatcgtccggattcaggcgcggcgtcgcggaaagtagcgcctgagtgtacggatggcgcgggttattgaanatttggtctttcgttcccttctccacgcagcggcccaggtacatcaccatcacttcatcagcaatgtgctccaccaccgacaggtcgtgggagatgaagacataagaaagccccagttcctgctgcaaatccatcatcaggttgagcacctgtgcacgcaccgagacgtccagcgcggagaccggttcatcggcaatcaccacgtccgggtcgagcatcagacctcgggcaatggcgatacgctgacgctgaccgccggagaacatatgcggatagcggtcatagtgctcggttttcaggccgactttcgccatcatcgacagggctttttcccgacgctgttctttgcttaagctggtgttgatcagcagcggctcttcaagaatttgcccgacttttttacgcggattcagcgaaccgtaagggttctggaagacaatctggattttctgccgacgcagcttctgcgcctgcggatcgtgcttaagcagatcctgcccctggtaatacagctcgccgccggtgggcgtttcaatcatcgtcagcaaccgaccgagggtcgatttaccgcagccagattcacctactaccgccagcgttttgccacgttcaaggttaaacgaaacgccgtccagcgccttcaccagacgttccggagcgaacatacctttcttcaccggataatgttttttcaggtcgatagcctgcaacagcggttgttgcgaggtggcctcttgcgtactcatagtgtcggcctcccggcatcatcaagtgggtaatggcatttggactgacgcccgtcagcgagcatattcagcgccggttcttcagcgcgacatctgtcagtggcataggggcagcgcgggttaagcaagcagccgttcgggcggtcgtacttgccgggaacaacgccaggcaacgatgccagacgttctttgtcctgagcaaattccggcagcgcacgcagcaatgcctgagtatacgggtgacgcggcgcatggaagatggcgtgcgcatcgcccgtttccaccacctgaccggcatacatcacgatgattttatgtgccgcttccgccaccagcgccaggtcatgggtaattaacaccagcgccatgttctctttctgctgtagctccagcagtagttcaatgatttgcgcctgaatggtcacgtccagcgcagtggttggttcatcggcaatcagcagttttggccgacaggcaatggccatcgcaatcatcacgcgctggctcatgccgccggaaagctgatgcgggtaaacatccagacgcgaagccggatcgggaataccgacctgattcaacaagtcaatcgcccgctgacgacgagtgctcttattaccgccctgatgcaccttaatcgcttccataatctggaaacccacggtgtagcacgggttaaggctggtcatcgggtcctggaagatcatcgccacttcggcacccaccaggttgcggcgctctttttccgagatacgctgcaaatcctgaccgttaaactccagcttttccgccatcacgcggcccggataatcaatcagccccataatcgccagcgaactgaccgacttaccggagccagactcacccacaatcccgactacttcgccctgttttacgctgtagctaatgcggtctacggcgcggaacggtgcgctttcgtcgccgaaatgcaccgataatttatctacatttaataacgccatctcgaacctcttactgcttcagtttgggatcgagcgcgtcacgcagaccgtcacccatcaggttaaatgccagcaccgtcagcaggatcgccagacccgggaaggtcacgacccaccaggcgctttgcgcgaactgcaacacgtcggagagcatggtgccccactccggcgttggcggctgcgcccccatgccgaggaaaccaagagcagccatatcgagaatggcgttagagaaaccgagcgacgcctgaacaatcagcggtgcaaggcagttcgggaagatgttaataaacatctggcgcatcgccccggctcctgccacgcgagaagcggtgacgtaatcgcgattcacctccaccagcacggcggcgcgggttaagcgcacatagtgcggcaaggcaacaaaggtcagcgccagcgcggcgttaccaatcgacgggccgaaaatcgccaccagcaccagtgccaacagcagacttggcagcgccagcatgatatcgaccacgcgcataatgatgttatcgaccaggccgccgaagtaaccggcgatcaggccgagaataacgcccataatcagcgataacaccaccaccagacagccaaccagcagcgacaagcgcgcgccgtacatcagccgcgacagcacatcacggcctacatcatcggtacccagcaagtgcgccatgctgccgccttcctgccaggctggcggggcgagcagtgcatcgcggaactgttccgccgggttatagggagcaatccagttggcaaagatcgcgataaacagcacgatgacgacgtaaaccagcccgacgaccgcgcctttgttgcgtttaaaatagtgccagaactcctgtaaaggggtcatcggtaccggcgcgctaatcactttattttcagtaacctgtgacatgatgtccccttacttcttatgacgaatacgcgggttcaccacgccatacagcagatcgaccagcaggttgacgaggataatcatcgtcgccaccagcaatacgccgccctgcaccaccggataatcgcgccgttgcagtgcgtcaatcaaccagcgccccagaccgggccacgagaagatggtttcggtcagaatcgcccccgccagcaatgttcccacctggaggccgataacggtcactaccggcagcatcgcgttacgcagcgcatggacgataatcacccgcatgcgnntcannnnnnnnnnnnnngcggtgcggatgtaatcttcacccagcacttccagcatcgaggagcgtgtcatacgcacaatgaccgccagcggaatagtacccagcacaatggcgggcaagatcatatgggcgacggcatcgataaagttaccgtcttcaccccagatggcggtgtcgatcagcataaaaccggttaacggattggaatcatcgaggaacaccatatcgctcacgcgaccggagacgggtgtcaggttccagtgcaccgaaaccagcatgatcagcatcatgccccaccagaagataggcattgaataacctgtcagcgccaggccaaccgctgtgtgatcgaaaatggaaccgcgtttaaccgcggccagcacaccaaccggaatgccgaccgcggtcgcaaaaatcatcgcgcagacgccaagttccagcgtggcctgaaagcgcggcacgaactcttcccataccggaattcggcttttcattgaaatgcctagatcgccatgcataacgccccaaatgtaatggagatactgctgccacatcggtttatctaagccgagttcagccagcaactgcgcgtgacgctctggggagatcccacgttcgcccgccatgatcatcaccggatcgcccgggatcatgtggacaaaggcaaatgtgagaagggtaataccgataaacgtggggatgacgagtcccaaacgtcggagaataaactgcaacataacccggattctctgtagtgacccgcagcctggaactgcgtgtctgtattgctcacaaatcaattcccgcccaggtcgggcagggaatgaagtattgctgccggatggcgctgcacgcagaggcacagcaccaccgggtatggcttttaattattcgatagagacgttttcgaagtgatgtttgcctaatggatcaaccacatagcctttaacttctttgcgtaccggttcaaacacggtggagtgagcgatgatcagtgccggagcctgatcgtgcatcaccacctgcgcttgcttgtacagttcaacgcgtttgttatggtcgtcggtagcacgcgccggttgaatcagatcttcaaacggtttgtagcaccattttgagtagttggagccttgttcagaggcggcgcagctgaacagagtggcgaagaagttatccggatccccgttatcgccagtccagcccatcattaccgtctggtgctcgccatctttcgcacgcttgaggtactcaccccattcgtaggtgacaattttggcctgcacgccgactttcgcccagtctgcctgaatcatctccgccatgcggcgagcgttcgggttatacggacgttgtaccggcatcgcccacaggtcgatggagaaacctttttccagacccgcttctttcagcaaggctttcgctttttcaggatcgtaggtgtagtcctgaangtcgtcgttatagccccacatggttggcgggatcaggtttttcgctgatacacccgcgccctgataaaccgctttgatgatcgcgtctttgttcaccgcgtaggtcagagcctggcgaactttcacgtcatcgagtggttttttctgcacgttatacgagagataaccgacgttcagccccggcatttccatcaggttgatagatttatcctgcttcatgcgggcgatatctgccgggttcgggtacggcatcacctggcattcatttttctgcaatttagcgtaacgcacggaagcgtcaggggtaatagagaaaaccagcgtatcgatctgcggtttggtgccccagtagccatcaaacgctttgtagcggatacgggaatctttttgatactgctgtaactggaacggaccggtgccgattgggttgaggtccagtttttccggtgtaccggctttcatcatcgcatcagcatattcttttgacagaatagaggcgaagtccattgccaggtcagcgaggaacggcgcttccgggcgagtcagcacaaactgaacggtgttgtcgtccacctttttcacttcgctgatcagctccggcaagcccatgccttcgaagtattcgtagctgccgccagaaactttatggtacgggttttgcgcgtttttctgacgatcgaacgagaacaccacgtcatcggcattcatttcgcgcgtcggtttgaattctttattgtcgtgccacttcacacctttacgcagatggaaggtataggttttaccgtcttcgctgacttcccacttttcagcgaggcccggaatcacttcggtggtgccgattttaaattcaaccaggcggttataaagcggtacggaagaggcgtcataggtggtaccggaggtaaacagctgcgggttaaacccttccggagatccttctgagcaataaaccagagttttagcctgaacacttgctgcgacggtcatagccaccaggctgagaccaagcttcagcatccctgactttttcaaggaaatacgcattattctgctccaattgtgatgtttgttgttttaaccctttgcagtgggttgtcgctgcctgaccttttttgttttttgcccggtcgggtcaacgttatgaggtggggatgccgtactaattaacatcagtgtaacagtgcggatcctccataaaatgcccctcgtgacctacaatctgtcaacagaatgtgaaaacgtcaatacagccaaccgggatttacaccaacggtgagaatccacaaacaaagattaaaaaaacttcaaacagctatttgcagcagagaaatttgtgctactccaacatgaccagaacaatcagcttaatatttagcaacatttggtgattaagttttatgcatttagtgaaaaaaatctgaggaaaaggtggatatctgagcgattaataccatgaacgctaaaacgcacagcggaaaatgccagcgccagccataagtaacgcaaaaaaagatttaagcaaatataaaaaaagacaatggtttctgtcacaaatccgttaatggatagtgagatatggggcgcaaatttggcagggaaatgtgtggcgtgtaggtcgaataaggcgttcacgccgcatccgacaataagtgcggtgccgttgcctgatgcgacgctgacgcgtcttatcaggcctacgtcgagtcgaacctccctgcccccggaggttctcttcctcatgggctgcagatgcaaaaaagcctgctcgttgagcaggcttttcgaatttggtcggtgatagaggattcgaacctccgaccccttcgtcccgaacgaagtgcgctaccaggctgcgccaatcaccgaatgcggggcgcatcttactgcgcagatacgccctcgtcaatcccttaatagcaaaatgccttttgatcggcgagaaagtcagcaggcctcttagttagccgctgcctcttttgtctgcgggatgtgacaccagttgttgttttcgttaattccaccatccggtgaagtatagccaagacaacccatgatggtgtcgtacagctctacgtgacggcgtggcactttcatgtcggctgcttttttcagctgcgcaaacgcctgcgcattgaccggattttccagatatttatctgacatccagaccatcatcggtacgcggaactgctccggcggtgccagttcacgcggcgtgccgtgcaggtgctcgcgttcattaattgactcgccgtggtcagctgcgtagaacacaatcgctttcttatcgcgaacctgatcaatcacactggagataaagtgatccacataggtcaccgagttgtcataggagttgatcatctgcgctttggtacatccgctatcaacaccaatacattccggcttccactgcgcaaagctgcgcgggtaacgctgggtgtagttaaagtgcgaacctttggtatgcagaatgattagatgcttaccatccgggttgcgccccagcgattgctgcatttcgtctaccagcaacatatcatctaccggcttgccacggttacgtggctccgcaccaatctgttcacggtaagcaatattgtccgccatcgtattgctgtagaaccacatttcgctctgcatagcgtagaggtcagaactgaatcctaactgcttcagtaccgcgaaaatgttctgttcttttaatgtgcgctgcggattatcttccgcgcccccctgacgtacaaacatgcaacgcagagagagtttggttgcggtatcacaggagtaaccacggaacgccgccagatttttctcctgggccagcttcggcgtggtattacgctcatagccgaaaatgcccatatggtcccaacgcgtggtttcaccgatgataaacacgacataagtatcattaacattttgcggtgcctgataagtgaatttcttcgccgggttaagcaatgaattattatcggaagattcatcgacccgcgcccaggcgtacagccctaacgcagaaagccagtttgatggcagataagagttcgctacgacaccgccataactcggcaaatcaacgccggtcgccctctccactttcttctgctggatatccagcaaacgaatcggtgcccaaaccataattcccgccagtacgacgaccgccaggctgcgaatacgctgccctggggttcgcagttgtcggagcaaggtgtagcgacagcggttattccagataaggataagaggcaatgcgctaacggcgattaaccagagaataaagttcagaccaacaacttcttttgacaggtcgatatcggtggtcatgacggaagcgatgatgccataaccaatgaccacattaaggaaggtcatgtaatagctggcacctgcggaaaagagcacaaccagcgatgccagaatacgccagctgcggcggccaaacagcgaaagaagacgtagtaaaaagaaggtcaccagtacggtggcggccagttcaacaacagcagaaatgcctttccagacggtaaaatcgtgcgcatagctgccgaagcggcggtaaaaaaccgcgccattcataaaaaggccaatatagattgcaagcaaaaagctcagcttctgctgtgtaatcgatttgatgtatctcatgcaaacaaaccctggacaaacaggtgataacaccctgcttagcggcttttcaggcccagcaggggaaaagtgcggaggtagtcagataagtaaaatctacacgcgcgaaataagtngaccacagcaaagggaaaaagtgtggggaaagagtgtgcatgaagcacaaatttacaaaagtgcaagtccggaatagaccattttaacggattaaccgactattcagagataggttgggccaggatgctggcccagtaacttactcataggtgatggaaaaattgacaagggcattcgctgtgccaccagtggcctgagtgttgacgaccacataactcgcctggtagtgaagcgacgtggtttcgccatcaatcgcccattcaatcggcgttccgctggagcctttgggaacttgctgcgttcctttatcgtcctctatcttcaacgcaacacccgttgcgccaccagcctcaagggcaaacatggaatcatcatcgctgtccgactgactgtccatctcaacggtcgctttggatatcccatcgcactctttgagttcaatggtgaaatctttcttgctcaacaccgtaccgactgccgcaggtttttgcagcgtcattgttcccatatcgacttcgagatcgcttttttccatctcgcaagctttagtggtgatagtgatggagaaatgaatatcccctgccgggccaagatccgtcgccgcattcaccccgcaggcaaccagactcaaactggcgatgccgctatgcagcaatcgtttgaacttcatggcatcactccatttcaagatatatggtcgttacgccttcaaacgtcccgcctttaggcgctttacccgtcgtgctaatcggtaaagccagcagtcgaatcgcggcattgcggtgagttttagaatccaggctgctcaaatttaataacgtggtgctgcttgaatcattcggtaccaaannnttgccgctggaatctttcaccagtacgccaatatcggggttgcccatatccaccgctcggggatcgtcagcattggttgtcccctcaaggcgcaacgcaaccttgataccatcagagatattgttgcaatcgaagctgaggttaatttcttgctctgtcgcaccttcaggcatttgcccttgcctgtttttaaacgccgaggaggggaattcaccaaatggcacatccagcaccgtgccgggtttaatttcgcaatccagggttacggtgacacgcccctgaatagatacggaagatatgggtattgttccgtaatctttatttgttttcgaggcatacagttcggcaattaacgtcagagggatgacggaatcgccgataaagggtttagtaatagcaaaggaaagtagacctgcgccgcccatatagggcgtagtaatgactttgttgcatccggatgtttgcagcgcctgctggtttttgaaaggaacaaacccatacacactggtactgatgcgaattttcgtcgcaacctccagttcctccgtcaaagtataatatttcatactgtcaaccgtacggccagaagggggaagcatactcaccccctgcactagagtatctttttcattcttataagaatcaggacattcacaaattagcgatacgttttgtccattagaccagttaaggacatccggtaaaaccgttcctgcgacgttttttgccgcatcaggtataccaacatccacatcgacattatagtgataagtcgtgccatccgcgggggtacatggcccccacgcatctccggcaaatgccttgccagaaaatccgaatacgcatcctaataaggataatgctattgccgctttcatttcgctctccttgcttactggcaattggccgaaacaggaataattccgccctgttttaattccagggataatttataaggcgccacgcattgctgcgacgcgtcattaccccatttaatcaatacccgtccttcctctggcattccgctaatatagagctgtccttcttcaccaacgatactgctcacctcgttttgtttatcggtgattagcgttgccgttgctccaaagggcaccgggctgcccgcggaacgaagcagcgtcattaatacgcggtaaccaacgcgggtatcaaaacgcgctctgacaatcgctccacgcgttggcaccactttctggaacgcattttcaacgtcaacatcgtcacccaacgaatcgctacgcagtgagatttcgttttcacgatacggcatggcataaggcacgatcgcgttacccatccagtcaacctgaacgccgccgttattcaccacgcgggcattgcgcgcaccgggtacggagatgagcgtcatggtttcgcctagcggttgggaaagcgtcacgccttcgctatgaactatcacgccgccgcgaacgctgtagttgagctgccggtaatctttcccgtagctatagcctacgttgacattaccggacccaccctgatagccaacgttagcgttaccgctgttacccacaccgttgctggcgtagccttcctggacactgtagctcaggttgcgatcctcaagcagcgttccgctgaccccaacctgttgattggtacgaccatcctggtcggtcgtgacgcgatagttactccaggcccggcctagtggaacggaaatattgaaagaccacaagcgatcgctttcatcccattcagggcttttattccagctatatgcaatactgtaactgaccttgccaatacgtccgttgtaacccgccgataccgtgttctgtttacctgcgtcgttccagtaatcctgctgcgnnnnntttaaataaacagagccataggcccctaattgctgcgtcaggttaccctgtatttcgctgcgcttgtgataacggttatagtcgctgtcagcgtcactgcgcacatcggtggcttcctggaaggtatagaaaccgctggtaaagtaccgatagcccgcaaggcggaaatcggtgccgctttcgaagctcttggaatataagaaacgataagattgtccctggctatcgcgatcgttattcagttcgcttttagcctgcgtcacatcaatggaaatcgccccgatataaccaaagtttttccctatccctaatgcaaatgcattgtaattattagagattaatacgccgccgtaggccgtcatcccccacggtaaaccgtagatcagatcaagctgcccgaaacgcggcgaggcgctgtcataattcccggcctgatattcacctgcggcaaagctatatttgagatggccttcacgctggaaaattggcaccgatgagaatggctgaataaagcgttgttcactgccatccgcttctttaataatgaccgtgagatcaccgctgtttgcagtggggtaaagatcgtttatttcaaaggcaccaggctgcacataggtgcgataaataacgtagccgttttgttcaatactgacttcggcgttgcttttggcgatccctcgaacgatgggtgcaaagcctcgctggctgtcgggcagcatctcttcatcagaggctaacatcgcgccacgcatctgaacgctgtcaaaaatgtcccccgcggtcgccgtatcccccattgttaattgcgctttgaaagggatgatggccctactcaaagacgtaccgatattatcccactgcgctttgccaccggaatggctccaggtactgtaattccgtaaccgccaagcgccaaggttcagcccgctgcgtaagttgaggtagtagctgtcgctctttagcgtatctttaccatcatcatgatgaacagtgccattatcatcgacataactgctggaagaccccgtcgagtcatattcactgttgctcccgctaaaactgtaatccagcagcaacgcagggataccttcgtcccataaagattccggcaccgtgcnncgcgccacctggtgcatcgccgcctgagggaaacttaataccagcttttgttcactgaagtcgaaatggcttgaggccaggggaatgatttcgtcaaacggtacgcaggcttcggcagacaccagattgagggccggaaagctttcaacgcgcacgcccatctctgccagttgcgtccggctaaggcaaggcacaagggattcccccatcgctttgcgctgtgcttctgtggcctctttaaattccagtgtgcgggtttccattctctgttcattgacgtaaacagagacacgatagatgccgggtaactgctgttcctggcctttttcgaacatcgttaaatcgacatgctggcccacaccctgaacgtcctccaggaatttggggttaaactttccggcatgtgcagaaaacgtgctggcaacagcaaccgccaccacagagatagaaaaggaagaaaaagtacgtgaaacggtcttccgtgacattgagctatttctcctgaaaagatattaatcaatcaacatttttagtgatcatttccgctnacgatccaaagtcattgatggtgttatatttaattttagaaacgctacctaccccggcgggtaatgtgatatttaatgcccctttagcgggtaccatgcctgctttttcaatttctttgtcattcgcaaaaaattgattaaaggtaatattaaaaactgtcggattatcaacgcggagctgattaccgttacgcgtaaatcgcagttcatttggcgcggtttttacatcaccctttaaacctgccgggcgataaaaaagtttgattcgggtgcgaacggcaatctgcaaaacatttttgttttcgctgtcgtcacttttagatggaatggctttcacattaacccagtagaccgattcgcgatcctgaggcaggccgggcgtaatattcacaatacgcaaaatattgttcttttctggatcaagcttgaatagtgggggcgtaataataaacggtgtttttttgctgcccgcggcatcatccacccaggattggataagaaactcttccgtcttacttttattctgtacggtcagcgaggcttctttcttactgcaatcataaattacgcgagtagagctaagtccgacgccacccgccagaactgactgtgaaaggaacagagagagagccaacgcaacaaatttacttttcatcattcgatccatgaactttgacgactaatggcggcnntnnnnncgccatttgtaaaacggacgattactcgtaagacaggttgaaatcgacctgcgcattgccgtaaccggtcgttaccgttgccagagtagaaacgtagttagcggtaaagtagagaaccgtctggcctttactcagatcaactcttgctttaccaccgttaagagcgaccagggtattgctgttatcataaataccgataccaacacctttggccgcgcccgcttcagtgctaacagaaatcagatcagatttatntgcatcaccaacaccactaaagctcacattggcttttttcatcgtggtggtatcgcaatcttccagtttgatttcgaaaggttttgccggggatttgtcaccaaccgcagcaaatacagatttttgtacctgacccaacacaacttcctggttctgagagtcaacggacagtacgcaaggtgaatccacgatctcgcctgtaaatttaaccgtgccgtcaccagactctgctgcgaatacagtgccagaagttaacgccagtgcggttaaggcaaaaacgacctttttcatgaaaaactccatttaaaaaattacattaaaaagaaaatcttgatgtattaaaatcgacaactttgaaggaaggattatacaatgaaatacgaataataannnnnnnnnnnnnnnnnnnnnnnnnnnnnnnnnnnnnnnnnnnaatagcgcatccaatttcaaatcttaaaaaaatcattgcattacactttcacataaaaagctatcgtttatnnnnannannnnnnnaatataaaatatcaattaaacaaaacaaaaacattcaccncgcaaataataagataaaatatnnnnnnnnnnnnnnnnnnnnnnnnnnnaaaaaaggaggatttcctccccctttcgttcaaaacctgtagtttctggctaaatatgcgcctcacgcaatactttctgctctggctgacgaatcgtcgtagaaagcgccaatgacagaatcagcagagcaaagatgacgtagaacgtcacatagaagccgccaaacagtgaggcgataatcgaaccacaaatgctaccgataccgaaaccgaggtaaatcacaccgtagtttttcgccaggttattgaggccgaagaactcactgaccagtgacggaaagacggtaatagtgccgccaaagttaaatgccacgcaggcaatcgctgcaaagaacgtcactgcattcaatggtgcaaacagcagggccgccatacccaccagcgaaattacctgaccaatggtgataacacggatacgggcgattttgtcagacagaatgcccagcaccagacgacctgaaaggttggcgatggaaataacagtgactgcattggctgcagaaaccacatcaaggtgtgccagactttgggcgatatctttcgctaccccaatcacgtacaggccgctcatgcaggcagtcaggaacattaccgctaacatccagtactgcggtttacgcatcgactctgccagcgtgtaatctttctccaccacaccattgctggttttcacttcctgttttggtgcgtctttcattaacgttgcgccgaaaacaatcatcaccagcgcaatcgctccccaaatcacaaaggttttttccagaccgaccgtttccagcagctgcgtgtcgataaatttgaaacccaggctacccagaccataagaaccgatagcgaacgcggagatcagacctttacgctccgggaaccatttcacgcagttagagagcgtcagcaggtaacccgcgccatccgccagaccgaccagcacaccggcgcttaaccacagcatcatcaggttgtcagaatgcgctgtcaggaagaaccctaatcccagcaaaatgccggaagcgatggtgacgcgtttaacaccaaaacgttcctgcaatttgcccgcaacagaagacgatattgccagccccagacttaacaagccgaaagagaaagcgacctggcttaccggcgcatccagcttggcggaaagcgcgccgttaaacaggctccaggtataaaccgaccccagcgcaaactgggtaatgatagtaccgatgagtgtcaaccagcgggtacgctgataatttgaaggtgtcatggcagtattcctgcagtaataaaaaggaaaaatctctgccgacaaccataacgaagtgcactttatgcctggggaaaaacggcatgaaatgccatcagaacggaatgaaatgccttagttcaggaatgaatgacgcgacaattattcaccaaatttattatttggtaagttagcacccactatcgccacaactattgttattcaatggtttcaattgtgattgttacgttaaaatctggcactaacccccatcgtatacagataatcgctattgttagtggtattttctgcctgagatagcgcggcataggcggcaatattttgattgagcaacatatcagcgcctacggtgacatccagccagttgccgttctggtttgtcgccgtcatccggctcaggcctgattgcgccttccagatattctcgccaaattgctggttatagctgatttgcgcccagggtcggagatcgccaagccgggagtcaacacgccagcctaaggtactcacgctggcatgccataacggatcggtcagcgtggtagtactgtcgccaaactcgttatacatcgaggtggttgtgccatcgtaatgtaatgccgcgaccgggccagttgtaacctgttcatataaaggaaaattccagcccatactcatactgctggtcacatccacaggggtttcttccgccagattgacttccagtcccagcgccctttggctactttgaatacgttgcgacaaaatatcgttgtaatcaggttgatgatcactatcccaggtgtaacgctctgtggaatgcccgggttgcgtatcaacgatatattcttgttgccaggcgtaagctgtgttgagaaaaaaggcactgattaccacactcgccagcaggcttagctgccagcgaccaccgcttttttttatgatcattaacacgactccagggaagagccgaattcggcaatattattgtcattgtatgaaggatatcgggcatagtagccctgtattaaatattgactttttcaccgatgcgtcaagaaaagcggctgaaatttttacgatcgggtacatagcgagggaaagtatggaacgttgcggctgggtgagtcaggacccgctttatattgcctaccatgataatgagtggggcgtgcctgaaactgacaggaaaaaactgttcgaaatgatctgcctggaagggcagcaggctgggttatcgtggatcaccgtcctcaaaaaacnnnnnaactatcgcgcctgctttcatcagttcgatccggtgaaggttgccgcaatgcaggaagaggatgtcgaaagactggtacaggacgccgggattatccgccatcgcgggaaaattcaggcaattattggtaatgcgcgggcgtacctgcaaatggaacagaacggcgaaccgtttgccgactttgtctggtcgtttgtaaatcatcagccacaggtgacacaagccacaacgttgagcgaaatccccacatctacgcccgcctccgacgccctatctaaggcactgaaaaaacgtggttttaagtttgtcggtaccacaatctgttactcctttatgcaggcatgtgggctggtgaatgatcatgtggttggctgctgttgctatccgggaaataaaccatgattcgggaagcgcaacgttcagaactccccgcgatcctcgaactgtggctggaaagtacaacctgggggcatccctttataaaagtgaattactggcgcgagtgcattccgctggtgcgggatgcgtatcttgccaatgcgaaaaactgggtctgggaagaagacggtaagcttctcggttttgtcagcattatggaaggccgatttctggcagcaatgtttgtcgcaccgaaggccgtcagacgcggtattggtaaggcgctgatgcagtatgtgcagcagcgctatccccatctgatgctggaggtttatcaaaaaaatcaaccggcgatagatttttaccaggcgcagggttttcacattgtcgattgcgcatggcaggatgaaacccaactacccacctggattatgagctggccggtggttcaaacgctgtaagtgtcagttccggaccgttgtatttttctagccatgccagcgccgtattacccgcacagccattccccagccgcgagctggggagatctttggtcagcacgttcactgcgccgtttttacaaataccgtcagcggttaaatccagatccggccatgccccttcgtgaatgcaaatcacgccaggtttaattccctcgctaatgaccgctccggcaagaatttgcccgcgtgcgttccacagccgaacagtatcgccatcttgtatgccgcgcgcctgggcatcgtcaggatgaatggtgacaggctcacggtttgccaccgcgtacaattcgcgcagagaactgtaattcagctggctgtgcagacgatgcgccggatgagcagaaagtacctgtaactgttccggttcggcattgccctgccattcgtccggcaccagccacattggatgccccgggcaatccggataagcgtaatcggcaatacgctgcgagaagatttcaatcttaccgctggcggtttttaatggatgcgcctgcggatcgcggcannnnncagcgaagcgaataaaccgctcgctgtccgggttttccggcatctcaattaactggttggcttgccagaactcagtaaatggcggcaattcaacctgctggcttgccccgcgctgccgggcaacgttataaaacgtttccagccattgcagctcactttttccttccgtaaaacgtgcataaccgcccttctcccagcgttcacttaactcggcaaaaacatcaaaatcattacgcgcttcatagcgtggcggcaccacttgcttcatcggcaccagatgctgattactgtaatcaccggtcatggtgagatcattacgctcaaaagaggtagtcgcaggcagaacgatatccgcgtgttttgccgccgccgtccagaagcattcagagatcaccaccagctccggtttttgccaggcacggatcaggcgattggtatcctgatgatgagtaaagttggcaccgcccgcccaccagataaaacgaatatccgggaaatgtcggtccataccgttgtgttgatatgcnccaccggggttttccagtgcttcaacaatgcgggcgacagggattttatctaccgcatcgcagccacccggcaagctgccctgcatggaagagagtaccgcagcgcgccgcgtggggttaccaccattggcaaaatggtaagaaagaccaaaaccgccgccgggtgtgccgatttgccccaacattgctgccagcgtgacgatcatccagtgtttttgctcaccaaactgttggcgctgcattccccagccagccatcagcatggtggtattttggtggaaaatagccgccagctcgcggattttctctgcgttaacaccacaaatctctgctgcccattcggcggttttcgctattccgtcactctcgcccagcaaataagaggcgaagacggcataaccggtggtgcaacgcgccagaaacgcttcgtcgtgccaaccattttccaccagcgtatgggcgatccccagcatcagcgcaacatcagtgcccatgtgcggtgccacccactccattttatcgccaaagaaatcgacggtttccgatcgcattggatcaatgcagatcagctttttcccgctgtcacgcagtgcagaaaagtaagaaagcccctgctcatcggatgcattccacgcaattttcagcgtattgagtgggttagcactccacagcaccacgacatcgctatgttccagcaccagcggccaactggtctgctgttgataaacttcactaccacccacgacatacggcatgatcgcctgtgccgcgccggtcgaataatcccccagatgcccggtataaccgcctgccagcgccatatagcgttgtaataatgtcgaggccttatgcagcacgccgtttgaacgccagccgtaggaaccagcaaaaatcgatgccggaccataagcctcacgaatgcgtttatgttgttggtgaataagatccagcgcctcatcccaactcacgcgaacaaattcatcctgcccacgaatgccttgcgggttttccggtgacgcgagaaagcctttgngcaccattggaaatcgtacccgcgtattgctgtgaacctggtcacgaaccgcgctctgcaaggagttttccattcctgtggctaacgcgccacgcgagctaaacacggtttcgccgtcggtttcaaccagcatgggcccccaatgggcggcagtcagaacggaatatcgtgaggatgagttggtcaaaccgaagactcctgaaaggttagatgtattgagcagttaaatattacttacaaatttccgagtattcccaggaataatcttcatgttcacgcggcataatctcccgccacggaacccgtggcaaagaataaaaaggttattaaggattaacaatgaagaaacgtgtttatcttattgccgccgtagtgagtggcgctctggcggtatctggctgcacaactaacccttacaccggcgaacgcgaagcaggtaaatctgctatcggcgcaggtctgggctctctcgtgggcgcgggtattggtgcgctctcttcttcgaagaaagatcgcggtaaaggcgcgctgattggcgcagcagcaggcgcagctctgggcggcggcgtgggttattacatggatgtgcaggaagcgaagctgcgtgacaaaatgcgcggcactggtgttagcgtaacccgcagcggggataacattatcctcaatatgccgaacaatgtgaccttcgacagcagcagcgcaaccctgaaaccggcgggcgctaacaccctgaccggcgtggcaatggtgctgaaagagtatccgaaaacggcggttaacgtgattggttatactgacagcacgggtggtcacgatctgaacatgcgtctctcccagcagcgtgcggattccgttgccagcgcgttgatcacccagggcgtggacgccagccgcatccgtactcagggccttggcccggctaacccaatcgccagcaacagcaccgcagaaggtaaggcgcaaaaccgccgtgtagaaattaccttaagcccgctgtaatccctttcatgccaggtgatgcagaaatcacctggcattcttcagttttccttcatcatatttcaggctaaggtgatcgccttatcagtgaatggagagaagcatgaagccgtccgttatcctctacaaagccttacctgatgatttactgcaacgcctgcaagagcatttcaccgttcaccaggtggcaaacctcagcccacaaaccgtcgaacaaaatgcagcaatttttgccgaagctgaaggtttactgggttcaaacgagaatgttgatgccgcattgctggaaaaaatgccgaaactgcgtgccacatcaacgatctccgtcggctatgacaattttgatgtcgatgcgcttaccgcccgaaaaattctgctgatgcacacgccaaccgtattaacagaaaccgtcgccgatacgctgatggcgctggtgttgtctaccgctcgtcgggttgtggaggtagcagaacgggtaaaagcaggcgaatggaccgcgagcataggcccggactggtacggcactgacgttcaccataaaacactgggcattgtcgggatgggacggatcggtatggcgctggcacaacgtgcgcactttggcttcaacatgcccatcctctataacgcgcgccgccaccataaagaagcagaagaacgcttcaacgcccgctactgcgatttggatacactgttacaagagtcagatttcgtttgcctgatcctgccgttaactgatgagacgcatcatctgtttggcgcagaacaattcgccaaaatgaaatcctccgccattttcattaatgccggacgtggcccggtggttgacgaaaatgcactgatcgcagcattgcagaaaggggaaattcacgccgccgggctggatgtcttcgaacaagagccactttccgtagattcgccgttgctctcaatggccaacgtcgtcgcagtaccgcatattggatctgccacccatgagacgcgttatggcatggccgcctgtgccgtggataatttgattgatgcgttacaaggaaaggttgagaagaactgtgtgaatccgcacgtcgcggactaagccgcgactgcgtggagtaaagcccgataatcgctcgggcttttactctttattgggttgcagtaactgctgtagtccaggcctgattaaacgcctgatgttgtgccggtaatggcgcaatcagtttgttatattcacttgcctgctgtgaagtcgggaactggatgccatttgctacaaagctcacctgagtaccttgttgggcaatgtagtctccaaccatcaccagttgttgcgtgaaagtttgtgccgccggaatcaacggttgcaatgcatcagctggcgtcgttaccactttggtgaatgcctgatcaaagaccggtttcaggtcatcactctgttttagcgcagagtgcgcagcatcggcctgcaacttcgcattttgcagttgttgcgccagcacacccagcgaaccattcatttcacgcagcggaccgctttgcgtaacgtaatcctgcggtacgcgaattgcgttaacgctgtctacaaccgggcgcagaccggaatccatcgcctgattcacctgctgagaataaccatacagaatcgcgtaatcagagacaaaaggaccaaactgttttttctgatcggcagtcagggttggtagacgttcaccgctacgcatcactgtattctgcaggaagtcgataaacgctttacgctgatcgccttctttatcaaaacacccactcaggctaactaccattaataacgccgcaagaggcgcaaaccagcgagagcaggactttcctgtcgccattttcttactcctttcacccaaaaaaagcgcacaacgacacacgcgtgtctgacgtgacaaggatagtccaggacaggcttgcaggataccctttctacgtaatcttcctggtaaaatcatggagaaaatgaaacaaggttaatttgttgtttcattgttaaaaaatgatattgccgttgccttttttgtagccagagatttacgccttcgcagaaggttagattttcgaaatctttacaaaccaggagtggttagagatatatcggcatttatcagatcgttaggtggctataagtcacgctaaatgactggctgaatcgaatcatagccagagcatgccctgacttcaccccgctgtgtctgcttttcccgactattcttaatgagcttcgatgcaattcacgatcccgcagtgtgatttgaggagttttcaatggaatataaagatccaatgcatgagctgttgagcagcctggaacagattgtttttaaagatgaaacgcagaaaattaccctgacgcacagaacaacgtcctgtaccgaaattgagcagttacgaaaagggacaggattaaaaatcgatgatttcgcccgggttttgggcgtatcagtcgccatggtaaaggaatgggaatccagacgcgtgaagccttcaagtgccgaactaaaattgatgcgtttgattcaagccaacccggcattaagtaagcagttgatggaatagacttttatccactttattgctgtttacggtcctgatgacaggaccgttttccaaccgattaatcataaatatgaaaaataattgttgcatcacccgccaatgcgtggcttaatgcacatcaacggtttgacgtacagaccattaaagcagtgtagtaaggcaagtcccttcaagagttatcgttgatacccctcgtagtgcacattcctttaacgcttcaaaatctgtaaagcacgccatatcgccgaaaggcacacttaattattaaaggtaatacactatgtccggtaaaatgactggtatcgtaaaatggttcaacgctgacaaaggcttcggcttcatcactcctgacgatggctctaaagacgtgttcgtacacttctctgctatccagaacgatggttacaaatctctggacgaaggtcagaaagtgtccttcaccatcgaaagcggcgctaaaggcccggcagctggcaacgtaaccagcctgtaatctctgcttaaaagcacagaatctaagatccctgccatttggcggggatttttttatttgtttttcaggaaataaataatcgatcgcgtaataaaatctagtattatttttnngaaaaataaatttgggtgcaatgagaatgcgcaacgccgtaagaaaggcgggaataactttccgccgaagactcttactctttcaaattgcaggctaaaaatgccgccagctcataactcccctgtttaatatgcaattcacacagtgaatctcttatcatccaggtgaaaaataaaagcgcgaaacaaatcactattaaagaaagcaatctatatttctgcggcattcccagccccctgtgttgatttccaacgagtaagaggctaaccttatggtgtctatacatagaggggcctcactttgatttatagtcaggtggggcttttctctgtctgcctttcggtgaatacctgagacaaacagtctcaagcacccgtggctattctagcttaataagtttgtttcttctccttgatataatcctaaaaaaatctcataaaattaatatatgagataatctttattcagcagaagattattaaaggttgctgtattatttagcgataaaaaaagcctgccagatggcaggctttttaataacggcgttattactgcaacagcgaaatatccgcaacgcgcaggaacagttcgcgcagtttctccagcatggtcagacggttgatacgcaattctttgtcatcaaccatgaccatcactttatcgaagaaggcatcgactggttcacgcagctctgccagttcgaccagcgcatcctggtaacgaccttccgcaaagtacggctccagcttgtcacgtagcaccacaacctgcatcgccagtttaatttcttccggctctttcagagtagaggcattcacgcgatcgctcagcacttcgtcagatttcgccaggatgttagatacacgtttgttcgccgccgccagtgctgcagctgcttccagggtacggaagtgcgataccgctttcatgcgggcatcgaaatcagccggacgagtcggacgacgcgccagtaccgcctggatggtgtcaacggtataaccttcgtcctgataccaggcgcggaagcgaccgagcataaagtcgataacatcatcaactacgttggcattagtcagcttatcgccatacagacgcaccgcttcttcggtcagcgtttgcagatcaaggttgaggttcttctcaacgataattcgcagcacgccaagtgcggcacgacgcagcgcaaacgggtctttgtcgcctttcggatgctgaccgataccgaagatacccgccagagtatccatcttatcagcaatcgccagcgcacaagctaccgggttggacggcaggtcatcaccggcaaagcgcggctgatactgctcattcagcgcgacggctacgtcttccgcttcgccatcgtgacgcgcgtagtgcatccccataacgccttgggtgtcggtgaactcgaagaccatgttggtcatcaggtcacacttagacagcaggcccgcacgggttgcgtggttaacgtcagcgccaatctgttcggcgatccagccagccagcgcctggatgcggtcagtcttgtcacgcagcgtacccagctgttgctggaacagcacggtttgcaggcgcggcaggttatcttccagacgttttttacggtcggtgttgaagaagaactcggcatcagccagacgtggacgaacgactttntcgttaccagagataatttgctgcggatctttcgattcgatgttggcaacgaagataaagttcggcagcagtttgccgtcgttcgcatacaccgggaagtacttctggtcacctttcatggtgtaaaccagtgcttcagacggcaccgcgaggaatttctcttcaaatttcgcggttagaacgaccggccactccaccagcgaagccacttcttccagcaggctttcgcttaagtcagcgttaccgccaatcttacgcgctgcttcttcggcatcggctttaatcttcgccttacgttcttcgtaatcggcgatgactttcccacgctcacgcagaatttccggatactgatcggcgttatcgatggtgaattccggctcgcccataaagcggtggccgcgaatcacgcgatcggactgaatgcccagaatggttgcaggaatgactttgtcgcccagcagcagggtcacggtgtgcaccggacgcacgaagtgcacgtcgcttgcaccccagcgcatcagtttcggaatcggcagtttcgccagcgaagtcgcaaccatattcggcagcagtgcttcagtgctttcgcccttcacatgggcgcgatacagcagccattcgcctttatcggtagtcagacgctcagcctggtcaacggtaataccgcaaccacgcgcccaaccttctgccgctttgctcggtttgccttcagcgtcgaacgcctgggcaatcgccgggccgcgtttttcgatttcacgatccggttgcgcttccgccaggttagctactttcagcgccagacgacgcggagcagcaaaccattgaacggtgccgtgtgcgaggcctgcgttatccagctccgcantnaagttcgcagcaaaggactctgccaggctgcgcagtgcttttggtggcagctcttcagtgccgatttccaccagaaaagttttctcagacatagccgcctcttacttatctttgttgcacatcgggaagcctagggcttcacgggaagcgtaatatgcttctgccactgctttggtcagggtgcgaatgcgcagaatgtagcgctgacgctcggtgacggagatggctttacgcgcatccagcaggttgaagctgtgggcggctttcagaatacgctcgtaagctggcagcggcagcggattttccagcgccagcagctgctgcgcttctttctcgtactgctcaaagcaggtgaacaggaagtccacatccgcgtattcgaagttgtaagtggactgctccacttcgttctgatggaacacgtcgccgtaggtggttttacccagcgggccgtcgctccagaccaggtcgtaaacgctgtctacgccctgaatgtacatggccagacgttccagaccgtaggtgatctcgccggtaaccggtttacactccagaccaccaacctgctggaagtaagtgaactgcgtcacttccatgccgtttagccacacttcccagcccagtccccaggcacccagcgtcgggttttcccagttatcttccacgaaacggatatcgtggatagtcgggtccatgcccagctctttcagagaaccaaggtacagctcctgaatattgtccggcgatggcttaatgaccacctggaactgatagtagtgctgtaaacggttggggttttcgccgtagcgaccatcggtcgggcgacgagaaggctgaacataagcagccgccatcggttctggccccagcgcgcgcagacaggtcattgggtgagaggttcccgcgccgacttccatgtccaatggttgaacaatggtgcagccctggcgagcccagtaatcctgtaaggtcaggatcaagccctggaaggtcctggtatcaaacttttgcatattatttcgtgctggatacgtgtggatttaaaggaagggatcagtatacccgctggatggaagatatacagtatgaaacgggaaaaagcagggcttaacgcatggaaagatgcaaaaaatggccatctgcgtcaaaagaacagacaaactgctctttacggaaggtataaccgcgcatttcatagcttccctggaactgttcgaaggcggtgacgtcgattttttgctcgccggtgttataacgttttgccgcctgatccttgcataacgcttccatattcaacgaacgcagaggatcaacctttacccgttgtgctttctgcacgggtgacggtgtagaacaacccactagcaccataagcgccattgccggaaagaaagagttcatcatcattaaattaccgtctggtttgcaggtgagtcttattatttatatcggtatagtggctgatatcttacgaatttccttaagcctctataagctgtagtgttaaaactcagattattccagtgcgccaactgaatgatttatcggtcagactttttttaaccagatacagagacacagatgcagcccaaaatttactggattgataacctgcgagggatagcgtgtttaatggtggtgatgattcacaccactacctggtatgtgaccaatgctcatagtgttagccccgtcacctgggatatcgccaatgttctgaactctgcctctcgtgtcagcgtgccgctatttttcatgatttccggctatctcttttttggcgaacgcagcgcccagccgcgccatttcttgcgtatcggcttatgtctgtttttttatagcgcaatcgcgctgctctacattgcactgtttacctccattaatgtggagttagcgctgaaaaacctgctgcaaaagccagtgttttaccacttatggtttttcttcgcgattgcggtgatttatctggtttcaccgctgattcaggtgaagaacgtcggcggaaaaatgttgctggtgctaatggtggtgattggtatcatcgctaacccaaacaccgtgccgcagaaaatcgacggttttgaatggctgccaattaacttatatatcaatggcgatactttttactacattctgtatggcatgttgggccgcgctttagggatgatggacacacagcataaagcactgtcgtgggtgagcgccgcactgtttgcgacgggagtttttattatctctcgcgggacattatatgaattgcagtggcgcggaaattttgccgatacctggtatctttactgtgggccgatggtttttatctgcgcaatcgcgctattgactctggttaaaaacacgctggatacgcgtaccattcgcggacttggcttaatctcccgccattcgttgggtatatacggattccacgccttgattatccatgcgctgcgcacccggggaattgagcttaaaaattggccaatactggatattatttggattttttgcgcgacgttggcagcgagtttgttactttctatgctggtacaacgaatcgacagaaacagattagtgagttaagtaaaagcccggtcacattggactgaccgggcttacgtgagttattcgctgtattcttcctgggtaacctgtgtttcttttggtgggtttattccggcatcacgaatatttttctgcaccgctactgcaccaaacaagcttaagaagaaagccagtccataaaaacctttttcgctgagtaataatgtcgcattccacagacctaccatcagtaatgcaacagagataataaagacagtcaggcaggtcatataataaatggaagtggtcggtatgccttcatacttgtcccgaacggtcttttgataagacgccgcagaaaacagtcctaataccagtacggcaaaataatatcctttttcatttaactgcatctctgcattccatagccctaacagataggtaacgataccaccaacgagagctatccatgacacaatactaaaggccggngaataggttgatattttgttgtccatcacagtattcctttcattcctgaatgtgtaagagctttatgttgctcataccgagcgaaacaaacgcatttgaccaaacaagcagacaaaaaaggcgatggggtagatcaccatttcataagcattgataggtgcatttaaaacaccgataaacaagagaccgatagtgattaacgcaactaactggcaaatatgggtaaaaaaattatccagttgcccgagtttttctgcgcgaagatatgcatagttgccaaaagttgctgtcattaacacgccaagaaaatagccttttccactcaacaatgggcatgagatccatagcccaaccagataaaccagcgccccgacaacaaataatagttttgccacagtttttgaggttttcataacgatctccatatctaccagcgatacattacgagtaaccaacgaaagacaaaactgaaaaatgccattaacaaatgattttcagaataaattcatactaaatattaattaattgctgagatatatagatgtgaattatcccccacccggtcaggcaggggataacgtttacgccattaatggcagaagttgctgatagaggcgacggaatgtttcacgtcgtggctgataagcggcataacgctgcgcatctggtagatgcgactgttctaacggtagttgcggcaacaactcaatgagcgatttctctggattcgccgcaatctgcgccagccttgctgcgcccagtgctggccccacatccccccccgtacggtaatcgagctgctgaccgctgatatccgccagcatctgacgccagtactcactacgcgccccgccaccaatcaacgtaacactttgcggtttaatgccgcaggcatgcacgacatccatgccatctgccagcgcataacccacgccttccagcactgctcgcgccagttcattggggccatgttgatgagtcaaaccaaagaaaacccctttcgcctggggattattgtgtggtgtacgctcgccggaaagataaggcagaaaccaaactggctcggcactttcatcagcctgttgagctgcagcgattaaagctgggacattgctcaggccggttaatttcncggcccaatccagacacgacgctgcactcagcattacagacattaaatgccaacgctgcggtagcgcatggcaaaagctgtgtacggcgctttctggcttgcttaagaacccttcgctgacagcaaaatagacccccgacgtccccagcgataacattgcctgattagcatcaaccattcccacaccaactgcaccagctgcattgtcgccaccgcctgcgacaactggcaccgtcgccataccccacgctttcgcaacttcaggtaacaaagcaccagtaatttcgctgccttcgtataatgcgggcatctggtcacgagataagtcgcaagcctgcagcatgacgtcactccagtcacgctttgcgacatccagccacatggtgccagctgcgtcagacatatcgctggcaaactcccccgtcatacgcagacgcaagtaatctttcggtaataatactttgtcgatttgacggaatatctccggctcatgccgctgaacccatagcaatttaggcgcagtaaatccgggcatcatcaggttgccggtaatcacccgcgatagcggaactcgcgcttccagcaaagcgcactcttgcgcacagcgcccgtcgttccacaaaatggcagggcgcaatacccgttgttgagcatccagtaaggttgctccgtgcatctggccggcaatacccaatgctttaacgtcctgcagagaatgctgatcgcccagagctttcattgcgcgatcagttgcctgccaccactgttccgggtcttgttccgaccagagtggatgcgggcgcgaaacggtcagcttttccgtttgcgaagcaaccacctcaccctgctcgttgagcaaaataacttttacgcccgaggtgccaagatctatcccgatatacatatcgatcgttccttaaaaaaatgcccggtatcgctaccgataaccgggccaacggactgcacagttagccgttatttgtcgaacagataatgatttaccagattttccagttgctcctggcgaccactctgatgcaccggagacaaattatgttcctgagcatatttggctaaatctgccagtgacatttggcctttcaggatttgctggcccaattcgctattccagccggaataacgctgcgcgatgcgtttatccagctcgccatcttcaatcatgcacgctgcaattttcagcgccagtgccatcgtatccatcgcgccgatatgaccgtaaaacagatcatatttatcagtactttgacgacgtactttggcatcgaagttcagaccaccggtggtgaaaccgcctgctttgagaatttcatacatcaccagcgcattctcttccacactgttcgggaactggtcggtgtcccagcccagttgcgcatcgccacggttggcgtcgacagaaccgaacaggccaagcgcaatggcggtggctatttcatgatggaaagagtgacctgccagcgtcgcgtggttagcttcaatgttcagtttaatctctttttccagaccaaactgtttcaggaagccatagactgtcgcagcatcgtaatcatattgatgtttagtcggttcttgcggtttcggttcgataagcaacgtgccctggaagccgattttatgtttatgctcaaccaccatttgcataaagcggcccagttgttcacgctcctgacgcaaatcggtatttaacagcgtttcgtaaccttcacgaccgccccacaggacatagttttcaccacccaatttatgggttgcttccatcgctgtaacaacttgcgttgccgcccagctgaagacttctggatctgggttngtcgccgcacccgcgccatagcgagggtttgtaaagcagttagcggttccccacagcagcttcacgccgctctcttcttgcttgcctgccagaacatcaaccatttgcgcaaaattattgatgtactcttttaacgacgcgccctcaggagaaacatccacatcgtggaagcaataaaatggcacatgtaacttgtggaaaaactcaaatgcgacatctgctttacgcttcgccaacgccagtgcctcaccaggctgctgccacggacgattaaacgcccccacaccaaacatatccgccccgttccagcagaaggtgtgccagtagcaggcggcaaatcgcaagtgctcttccatacgcttgcccaacaccagttcgtcgggattgtagtgacggaatgctaacgggtttgaggattttgagccttcataacgaacgcgatcgagctggtcaaaataggcttgcatattgaactccataatcaggtaatgccgcgggtgatggatgatgtcgtaatattgggcactccctttcagttgctcaattatgttatttcacactgctattgagataattcacaagtgtgcgctcgctcgcaaaataaaatggaatgatgaaactgggtaattcctcgaagagaaaaatgcaataagtacaattgcgcaacaaaagtaagatctcggtcataaatcaagaaataaaccaaaaatcgtaatcgaaagataaaaatctgtaattgttttcccctgtttagttgctaaaaattggttacgtttatcgcggtgattgttacttattaaagctgtcctctaactacagaaggccctacaccatgaaaataaagaacattctactcaccctttgcacctcactcctgcttaccaacgttgctgcacacgccaaagaagtcaaaataggtatggcgattgatgatctccgtcttgaacgctggcaaaaagatcgagatatctttgtgaaaaaggcagaatctctcggcgcgaaagtatttgtacagtctgcaaatggcaatgaagaaacacaaatgtcgcagattgaaaacatgataaaccggggtgtcgatgttcttgtcattattccgtataacggtcaggtattaagtaacgttgtaaaagaagccaaacaagaaggcattaaagtattagcttacgaccgtatgattaacgatgcggatatcgatttttatatttctttcgataacgaaaaagtcggtgaactgcaggcaaaagccctggtcgatattgttccgcaaggtaattacttcctgatgggcggctcgccggtagataacaacgctaagctgttccgcgccggacaaatgaaagtgttacaaccttacgttgattccggaaaaattaaagtcgttggtgaccaatgggttgatggctggttaccggaaaacgcattgaaaattatggaaaacgcgctaaccgccaataataacaaaattgatgctgtagttgcctcaaacgatgccaccgcaggtggggcaattcaggcattaagcgcgcaaggtttatcagggaaagtagcaatttctggccaggatgcggatctcgcaggtattaaacgtattgctgccggtacgcaaactatgacggtatataaacctattacattgctggcaaatactgccgcagaaattgccgttgaattgggcaatggtcaggagccaaaagcagatacctcactaaataatggcctgaaagatgtcccctcccgcctcctgacaccgatcgatgtgaataaaaacaacatcaaagatacggtaattaaagacggattccacaaagagagcgagctgtaagcgttacgccccagcgcggagcgggggcgtgatttctctccatgccgcgtgaatgaattggcttaggtggagtcgctatgccttatctacttgaaatgaagaacattaccaaaaccttcggcagtgtgaaggcgattgataacgtcagcttgcggttgaatgctggcgaaatcgtctcactctgtggggaaaatgggtctggtaaatcaacgctgatgaaagtgctgtgtggtatttatccccatggctcctacgaaggcgaaattatttttgcgggagaagagattcaggcgagtcacatccgcgataccgaacgcaaaggtatcgccatcattcaccaggaattggccctggtgaaagaattgaccgtgctggaaaatatcttcctgggtaacgaaataacccacaatggcattatggattatgacctgatgacgctacgctgtcagaagctgctcgcacaggtcagtttatccatttcacctgatacccgcgttggcgatttagggcttgggcaacaacaactggttgaaattgccaaggcacttaataaacaggtgcgcttgttaattctcgatgaaccgacagcctcattaactgagcaggaaacgtcggttttactggatattattcgcgatctacaacagcacggtatcgcctgtatttatatttcgcacaaactcaacgaagtcaaagcgatttccgatacgatttgcgttattcgcgacggacagcacattggtacgcgtgatgctgccggaatgagtgaagacgatattatcaccatgatggtcgggcgagagttaaccgcgctttaccctaatgaaccacataccaccggagatgaaatattacgtattgaacatctgacggcatggcatccggttaatcgtcatattaaacgagttaatgatgtctcgttttccctgaaacgtggcgaaatactgggtattgccggactcgttggtgccggacgtaccgagaccattcagtgcctgtttggtgtgtggcccggacaatgggaaggaaaaatttatattgatggcaaacaggtagatattcgtaactgtcagcaagccatcgcccaggggattgcgatggtccccgaagacagaaagcgcgacggcatcgttccggtaatggcggttggtaaaaatattaccctcgccgcactcaataaatttaccggtggcattagccagcttgatgacgcggcagagcaaaaatgtattctggaatcaatccagcaactcaaagttaaaacgtcgtcccccgaccttgctattggacgtttgagcggcggcaatcagcaaaaagcgatcctcgctcgctgtctgttacttaacccgcgcattctcattcttgatgaacccaccaggggtatcgatattggcgcgaaatacgagatctacaaattaattaaccaactcgtccagcagggtattgccgttattgtcatctcttctgaattacctgaagtgctcggccttagcgatcgtgtactagtaatgcatgaagggaaactaaaagccaacctgataaatcataacctgactcaggagcaggtgatggaagccgcattgaggagcgaacatcatgtcgaaaagcaatccgtctgaagtgaaattggccgtaccgacatccggtggcttctccgggctgaaatcactgaatttgcaggtcttcgtgatgattgcagctatcatcgcaatcatgctgttctttacctggaccaccgatggtgcctacttaagcgcccgtaacgtctccaacctgttacgccagaccgcgattaccggcatcctcgcggtaggaatggtgttcgtcataatttctgctgaaatcgacctttccgtcggctcaatgatggggctattaggtggcgtcgcggcgatttgtgacgtctggctaggctggcctttgccacttaccatcattgtgacgttggttctgggactgcttctcggtgcctggaacggatggtgggtcgcgtaccgcaaagtcccttcatttattgtcactctcgcgggcatgttggcatttcgcggcatactcattggcatcaccaacggcacgactgtatcccccaccagcgccgcgatgtcacaaattgggcaaagctatctccccgccagcaccggcttcatcattggcgcgcttggcttaatggcttttgttggctggcaatggcgcggaagaatgcgccgtcaggctttgggtttgcagtctccggcctctaccgcagtagtcggtcgccaggctttaaccgctatcatcgtattaggcgcaatctggctgttgaatgattaccgtggcgttcccactcctgttctgctgctgacgttgctgttactcggcggaatgtttatggcaacgcggacagcatttggacgacgcatttatgccatcggcggcaatctggaagcagcacgtctctccggaattaacgttgaacgcaccaaacttgccgtgttcgctattaacggattaatggtagccatcgccggattaatcctcagttctcgacttggcgctggttcaccttctgcggggaatatcgccgagctggacgcaattgcagcatgcgtgattggcggcaccagtctggcaggcggcgtcgggagcgtggctggagcggtaatgggggcattcatcatggcttcactggataacggtatgagtatgatggatgtaccgaccttctggcagtatatcgttaaaggtgcgattctgttgctggcagtatggatggactccgcaaccaaacgccgttcttgattttgannnnnnnnttctcaaagccggtaacgtattaccggttttgagtttttgcatgattcagcaggaaaagaaccatgtttactaaacgtcaccgcatcacattactgttcaatgccaataaagcctatgaccggcaggtagtagaaggcgtaggggaatatttacaggcgtcacaatcggaatgggatattttcattgaagaagatttccgcgcccgcattgataaaatcaaggactggttaggagatggcgtcattgccgacttcgacgacaaacagatcgagcaagcgctggctgatgtcgacgtccccattgttggggttggcggctcgtatcaccttgcagaaagttacccacccgttcattacattgccaccgataactatgcgctggttgaaagcgcatttttgcatttaaaagagaaaggcgttaaccgctttgctttttatggtcttccggaatcaagcggcaaacgttgggccactgaacgcgaatatgcatttcgtcagcttgtcgccgaagaaaagtatcgcggagtggtttatcaggggttagaaaccgcaccagagaactggcaacacgcgcaaaatcggctggcagactggctacaaacactgccaccgcaaaccgggattattgccgttactgacgcccgggcgcggcatattctgcaagtatgtgaacatctacacattcccgtaccggaaaaattatgcgtgattggcatcgataacgaagaactgacccgctatctgtcgcgtgtcgccctttcttcggtcgctcagggcgcgcggcaaatgggctatcaggcggcaaaactgttgcatcgattattagataaagaagaaatgccgctacagcggattttggtccctccagttcgcgtcattgaacggcgctcaacagattaccgttcgctgaccgatcccgccgttattcaggccatgcattacattcgtaatcacgcctgtaaagggattaaagtggatcaggtactcgatgcggtcgggatctcgcgctccaatcttgagaagcgttttaaagaagaggtgggtgaaaccatccatgccatgattcatgctgagaagctggagaaagcgcgcagtctgctgatttcaaccaccttgtcgatcaatgagatatcgcaaatgtgcggttatccatcgctgcaatatttctactctgtttttaaaaaagcatatgacacgacgccaaaagagtatcgcgatgtaaatagcgaggtcatgttgtagcgatgatgagaattgtcggcgtcgcatcaggtaactcagcacaaccacctgatgcgatcaaaagccttatccgaccgacaagtcggataaggctcgaggaaatacaattacatatgcgccgcgattaaccgttggttatcctggtacattgcgaacaggtagttgttataactcttccctttggtcgagtagcccttcagcttgtgaatcatcgctgtggcagtcacttcctgatcagctttacgcagctgcgcacgcgatttacggaacgaagagtaagccggatgcgtattgaggttagtgacataggcgctcaccgattctttgacagaactaaactgtgagtaccctttcactttacctggcgcattggtacaacgtcctttcatgcatttcatgccgaaaagattgttgttgttgcgcgccagcttcgacgttccccaaccgctttctgctgcagccatcgtcgccaccatactggtagggataatgtctacgcgttcaagcaaggtattccacgggatttttcgcgtattaccagaccacttcaccttgtagcgtttggcgatgtctttcagacgcgcacgctcagcaggtgaccattggccctgatactgttttgaaatcagccagttacgttctgcagtaatggctgcattttggctggtaatgtaaggcattacggtccggagaaacgcctttttccttggtgttccggaagggtattttcgcaaatcaggaagtgaactactctttgcactattgcgagaatactcttgtttactgcttacctgtttattactagctttagttaagtgggacttttgactcgctgttgttgtgtgcgtcttcgctaacacctcactcgaaaacaccagagtgagtaacataagaatcatcgccccatatcgtcgtatgggagtcaaaatcatcaggtctcctggtcggatttaatcattccaacaccttatatttttcacaaatttgagagttgaatctcaaatcatatcaaaaatagctgtcaagagcaccccaaggaatagtccaaatctgaaactatgtcacgagttaacgattcagattggcgctaaatcgcagaaaatgtggggtttatcgcaaaattcagccgttttttgcgcgcgatcgctcacccttgcttctcatcctgtggacttaccgctcagggatgagttttgtctggcttatcgctggcaaactgtctgaaatcgcagcaataaggactcatccaccatgaaactcgccgcctgttttctgacactccttcctggcttcgccgttgccgccagctggacttctccggggttccctgcctttagcgaacagggaacgggaacatttgtcagccacgcgcagttgcccaaaggtacgcgtccactcacgctaaattttgaccaacagtgctggcagcctgcagatgcgataaaactcaatcagatgctttccctgcaaccttgtagcaacacgccgcctcaatggcgattgttcagggacggcaaatatacgctgcaaatagacacccgctccggtacgccaacattgatgatttccatccagaacgccgccgaaccggtagcaaacctggtccgtgaatgcccgaaatgggatggattaccgctcacgctggatgtcagagccactttcccggaaggagccgccgtacgggattattacagccagcaaattgcgatagtgaagancggtcaaataacgttncaacccgctgctaccagcaacggtttactcctgctggaacgggcagaaactgacgcctctgcccctttcgactggcataacgccacggtttactttgtgctgacagatcgtttcgaaaacggcgatcccagtaatgaccagagttacggacgtcataaagacggtatggcggaaattggcacttttcacggcggcgatttacgcggcctgaccaacaaactggattacctccagcagttgggcgttaatgctttatggataagcgccccatttgagcaaattcacggctgggtcggcggcggtacaaaaggcgatttcccgcattatgcctaccacggttattacacacaggactggacgaatcttgatgccaatatgggcaacgaagccgatctacggacgctggttgatagcgcacatcagcgcggtattcgtattctctttgatgtcgtgatgaaccacaccggctatgccacgctggcggatatgcaggagtatcagtttggcgcgttatatctttctggtgacgaagtgaaaaaaacgctgggtgaacgctggagcgactggaaacctgccgccgggcaaacctggcatagctttaacgattacattaatttcagcgacaaaacaggctgggataaatggtggggaaaaaactggatccgtaccgatatcggcgattacgacaatcctggattcgacgatctcaccatgtcgctagcctttttgccggatatcaaaaccgaatcaactaccgcttctggtctgccggtgttctataaaaacaaaacggatacccacgctaaagccatcgacggctttacccctcgcgattacttaacccactggttaagtcagtgggtccgcgactatgggattgatggttttcgggtcgataccgccaaacatgttgagttgcccgcttggcagcaactgaaaaccgaagccagcgccgcgcttcgcgaatggaaaaaagctaaccccgacaaagcattagatgacaaacctttctggatgaccggtgaagcctggggccacggcgtgatgcaaagtgactactatcgccacggcttcgatgcgatgatcaatttcgattatcaggagcaggcggcgaaagctgtcgattgtattgcgcagatggatacgacctggcagcaaatggcggagaaattgcagggtttcaacgtgttgagctacctctcgtcgcatgatacccgtctgttccgtgaagggggcgacaaagcagcagagttattactattagcgccaggcgcggtacaaatcttttatggcgatgaatcctcgcgtccgttcggtcctacaggttctgatccgctgcaaggtacacgttcggatatgaactggcaggatgttagcggtaaatctgccgccaacgtcgcgcactggcagaaaatcagccagttccgcgcccgccatcccgcaattggcgcgggcaaacaaacgacactttcgctgaagcagggctacggctttgttcgtgagcatggcgacgataaagtgctggtcatctgggctgggcaacagtgacttttccggcttcccgttcgtcagtacctcgggaagccgccaaccaggataaaatgtcagccctaatcagcgttgcaggataaagcaccgctcactcttcaacagaccgatttgcaccccagcaaatgtagcgttattgttaccttccttgctacagagttcgacagatatcccgctatgacattctccctttttggtgacaaatttacccgccactccggcattacgctgctgatggaagatctgaacgacggtttacgcacgcctagcgcgattatgctcggcggcggtaatccggcgcagatcccggaaatgcaggactacttccagacgctactgaccgacatgctggaaagtggcaaagcgactgatgcactgtgcaattacgacggtccacaggggaaaacggagctactcacactgcttgccggaatgctgcgcgagaagttgggttgggatatcgaagcacagaatattgcactaacaaacggcagccagagcgcgtttttctacttatttaatctgtttgccggacgccgtgccgatggtcgggtcaaaaaagtgctgttcccgctggcaccggaatacattggctacgctgacgccggactggaagaagatctgtttgtctctgcgcgtccgaatattgaactgctgccggaaggccagtttaaataccacgtcgattttgagcatctgcatattggcgaagaaaccgggatgatttgcgtctcccggccgacgaatccaacaggcaatgtgattactgacgaagagttgctgaagcttgacgcgctggcgaatcaacacggcattccgctggtgattgataacgcttatggcgtcccgttcccgggtatcatcttcagtgaagcgcgcccgctatggaatccgaatatcgtgctgtgcatgagtctttccaagctggggctgcctggctcccgctgcggcattatcatcgccaatgaaaaaatcatcaccgccatcaccaatatgaacggcattatcagcctggcacctggcggtattggtccggcgatgatgtgtgaaatgattaagcgtaacgatctgctgcgcctgtctgaaacagtcatcaaaccgttttactaccagcgtgttcaggaaactagcgccatcattcgccgctatttaccggaagatcgctgcctaattcataaaccagaaggagccattttcctctggctttggtttaaggatttgcccattacgaccgagcagctctatcagcgcctgaaagcacgcggcgtgctgatggtgccggggcacaacttcttcccagggctggacaaaccgtggccgcatacgcatcaatgtatgcgcatgaactacgtaccagagccggagaaaattgaggcgggggtgaagattctggcggaagagatagaaagagcctgggctgaaagtcactaaaaattgcctgatgcgctacgcttatcaggcctacatgatttctgcaatatatttaatttgcaagaatttgtgggccggataaggcgtttacgccgcatctggcataaacaaagcgcactattccggcgttgaganacgccggaaaaacgtttcaaacaggctgctgccgtagccgatgccgctgcactttctcgacatccatgcactgcaacgcctttgtcgggcaggcttcaacacaggccggtcccgtctcccgatgccagcacagatcgcacttaatcgccctcgcctttttgcgcgaagaaacgacctccatcgcaccaaacgggcaagccagcatacagcttttacagccaatgcaacgtgtttgttcaacgaaaatatgcccatgttcgcggcttatcgcgtcaacagggcagacattcgcgcacggtgcatcttcacactgatgacaggctactgccgtggtccagctgtggtctttaatgacacgaatacgggaaataaactcgtctggtgacaacgcagcgcaatcctgattctcctgatgcgacactgcgcaagccacttcacaggtacggcaaccgatacatttcgtcgcatccgcaataataaaccggttcatgatcactcctttgcactaaaacagcagagtgccagagagcgcgtccctactgctttgatccaacgaaggaaatgttaaagttttggcacttgtccaaagcgttatgtgatcgcgccctggtcgtccctgacagtaaatcccagttcattagaaatagcctgcgcggtttcacgcagtggtttcaggagatttttctcccccacctgtttcagacgtgatgtcgaaagcgaaatcgccccggcactacgaattgatatgttccttgctgtaacgccgcttccacgctgctggcgttaaaccggtgtgtttgcgaaaaatctgccggaaatagccaacgtcattaaacccgcacaacgccgccacttccgtgagcgatcgcgcttcgctaattaacagcttttcggcttcgcgcacccgctggcgatggattgcttctgttaacgtcagatgaaacacccgccggtagacgcgcccaagataatcggcattgcagtacagctcgcgggccagaagcgccgtagaaagcgggcgatgatattgcgtgcggatcagtttctgcgctttccaggcaagggtggtgcctgctccatcggcctgttcatcaagacgcgcgtcacgggtgagctgctgcaaaatgagcagcacaataaactccagcgccggagtgcgttgatgcttttcctgttcgcttaagaactggcgaaacagggccaccagcgcctgcggatcgacaaccttcgtttgttgcggcacgctaagatgagtaagccagcgagggtcgttgtccggcgctttaacctcaaaatgcagccagtaaaatttgagatcggcgggaaaatcctccaccccaacatgttgtcggttcggccagagtaataaactctctcccgcatcgaccagaaatatccgttcttcttcctgaatcgttaatcgacctttttcgacaaagataatttcccatgactccagccgccttgcaggatgcctccctacgccacgggaaataaataatccaccattttgcactttaatcggtaacgtcatggataattcgagcattgatatgtaatttcccgcttattcattaatgattaaacacattaccttttgattattaatcaaaaacattaatttcacctgatccatttcacacttttaaattcaggtcggaatcgtcacctttttttactcttttctcgccttgttgatattcccgttcacggcagaattaatcaggtcatttcaataaaactaaaaattgctccctattcacgaggaatatctatgacctctacaccgattactaccgctgatatcgctaaaggtaaaattgacgatgcgttatctgtacgggaaaaaataggctacggcctgggtgacgcaggcggcaccgtaataacttgcctgatcatgaattttctcacctttttctacaccgacgtttttggattaactccggcgctggttggcacgctgtttattgcactgcgcgtgtttgatgccatctccgacccggtgatgggcgtcattgccgaccggacgcaaagccgatgggggcgctttcgtccgtggcagctatggattgccattcctatcggcattatcggcatcctgacgttcaccgtgccagatgccagcatgggagtaaaaatcgcctgggcgttcggtacttacctgctcctttcagtcggttataccgccatcaacgtaccgtactgcgcgctgatcaacaccatgaccacccgccacaatgaagtgatctcctgccagtcctggcgattcgttctctgcggcgtagcgggatttctggtttcggtaggcttaccgtggatggtagctctcttcggtcagggcaacgctgcacgcggctatcaactgggcgtcggggtattgtgcgccattgccgtggtgatgttcctgtgctgtttcttctgggttcgtgaacgggtgccgctctccacaatggggaaatttaccctgcgcgaacatcttgccgggctgcggaacaacgaccaactgctgctgatgctggtcatgtctttcctgctgattaacgtctttaacattcgcggcggtgggtatatgtacttcattacctacgtcttacaaggcagcacgggctacacgtcgctgttcttcaccatggtcaccttcgcctccattatcggctcggtgattgtcagcccgttaacgcggcgtttcgataccgtcaaaatttattactacaccaacctgctcctcgctgcactggcggtgttgatgtggttcctgccctccggcccggcttatcaaacgctgtggctggcggtgatcctcggtaatggcgtgattcttggcttcacattgccactgcacttctcattgatggcctttgccgatgactacggcgagtggaaaacccacgtacgttcttccggcatgaacttcgccttcaatctgtttttcatcaagctggcctgggcctccagcgccgggatcatcagcctgctgtttatttttgtcgcctaccagcctggcgtggaaaaccagaccgccagttcgcttggcgggatcgcggcgatggaaacattactgcctgcgctattccacctgctgctggcaggggcgatccgcttttgcaaactcaataatcctatgatgtcacgcatagctaccgacctgcgtcagcgtcatgtacagccttaaggagcacaagatgaacatttcggaagtcgatctgcataaactgacggtcagcgatccgttcctcggtcagtaccaacaactggtccgcgacgtggtgattccttatcagtgggatgccttgaacgatcgtatcccagaagcggaacccagccatgcgattgaaaactttcgcattgccgccggacttcaggagggtgaattttacgggatggtgtttcaggacagcgacgtcgccaaatggctggaagcggtagcctggtcgctgtgccagaagccggacgccgaactggaaaaaaccgccgacgaggtaatcgaactgatcgcctccgcccaatgcgaagacggctatctcaatacttactttacggtaaaagcacccgaagaacgctggagcaatctggcggagtgtcatgaactttactgcgcaggtcatctgattgaagccggagtcgccttcttccaggccacgggaaaacggcgcttgctgggggtcgtttgccgcctggccgatcatatcgacagcgtatttggtccagatgaaagtaagttacacggttatcctggtcacccggaaattgaactggcactaatgcgcctgtatgaagtgactgaagagccgcgctacctggcgctgacgaactattttgtcgaacagcgtggtgcgcaaccgcactattacgaccaggaatatgaaaagcgcgggcagacatcgcactggcacacctacggcccggcgtggatggtgaaagacaaagcctacagccaggcacatttgccccttgcgcaacagcaaaccgccatcggtcacgcggtacgttttgtctatctgatgaccggcgtcgcgcatctcgcgcgtttaagtcacgatgacagcaagcgtcaggactgcctgcggctgtggaacaatatggcccagcgtcagttatatattaccggcggcatcggctcacaaagcagcggcgaagcgttcagcagcgattacgatctgccgaatgacacggtttacgccgaaagttgtgcttccatcggcctgatgatgttcgcccgacgaatgctggaaatggaaggcgacagtcaatatgccgatgtgatggagcgcgcactgtacaacactgtgctcggcggcatggcattggatggcaaacatttcttctatgtgaatccgctggaagtacatccaaaatcgctgaaattcaaccatatctacgatcacgttaaaccgatccgccagcgttggtttggctgcgcttgttgtccgccaaatatcgcccgcgtgctgacctcgattggtcattatctctacacgccgcgtgaagatgcgttgtatatcaacatctacgcaggaaacagcatggaagtgccggtagaaaatggcacgctgcgcctgcgggttagcgggaactatccgtggcaggagcaggtgacgattgcggttgaatcgccccagccggtacgtcatacgctggctttacgtctgccggactggtgcacacagccgcagatcatattgaatggggaagaggtcgagcaggatattcgtaaagggtatttgcacattacccgcgaatggcaggagggcgatacgctgaatctgactttgccgatgccggtacgccgcgtttacggtaacccgctggtgcgtcacgtcgccggaaaagtggcgattcagcgcggcccgctggtgtattgcctggaaaaggccgacaacggcgagtcactgcataatctgtggctgcccaccgatgcgccatttacgacatttgaaggcaagggattgtttagccataagatcttaatccaggcaccgggttaccggtatgaacagagcaatccagagcagcaaccgctgtggcattacgacagcgcgccagccaaacgccagacgcaaactctgacctttatcccgtggtttagctgggccaaccggggtgaaggcgaaatgcggatctgggtgaatgaggaaaagcattgccatccgtaggttggataaggcactcgcgccgcatccaacgtaaggagcacattgcctgatgcgacgcttaacacgtcttatcaggcatacaagtcggtgcgagagcgtaggccagccgcaccgacatccaccggtgaattaaaaacgccagctcacgccggtgacaaaggtaaaactctcattacgatcaatcatcgggctgtcggtaatctcttccggcagctcgctgtatcctgcgctcgccatcaatacgacgtgctctcctatcgggtattttgccgtcaggctgacatagggcacccaggcatcctgcgcggaataacttgccagaccgctacgacgggactcactctctgaaatgccatagtaatagtcactgaaattctcgtcataatagagaacgcccagcgcaggtgtcagcgacagacgacctatctgcattttgtggaataccgatagctcccccacccagccgttgctgttatccagaacgtccgcagctgcagaggctttcacggttccccaacgctcgtggtgataccaagcaacccccgccatagccgtactatcacgcttatcaagctgttgcatggcataatcgtcattatcggcagggtcaaattccagcggcatccaggatgcggtcaggctaagttcatttttttcactttgcgacagaataaaacctaacgtggtctgacgaacataaaaagaatcaccttcataactaatcagcggaattgcctttgtattttcattataaccgcgataaggcgattcattataagccgcaccagcaccaatggataattcagaagcagttgcgcttgccataaaaggcaacgcaaataacgccacaanattgcggttaattaacatgtccggtattccattttaaaataagataaaaaagagtcggcatagtaatgcttacaatttctccggtgcaagattcatatttatatagtaatatatnnnnnnnnanntaattgggctgttgcgatgacaaaattacaacttaagtaccgggagttaaaaattatctcggtaatcgctgccagtgaaaatatcagccatgccgcgactgtacttggcatcgcacaggccaacgtcagcaaatatcttgctgattttgaatcaaaagtgggtttaaaagtctttgaccgaaccacccgacaactgatgctcacaccttttggcaccgcgctattaccgtacatcaacgacatgctggacagaaacgagcagcttaataattttattgcagattataagcatgagaaacgtggtcgggtcaccatctacgccccaaccggcataattacctatttatccaaacatgtaatcgataaaattaaagatatcggtgatatcaccttatcgctaaaaacctgcaatcttgagcgtaatgccttttatgaaggcgtcgaatttcctgatgattgtgatgttttaatcagctatgccccaccaaaagatgaatcgctggttgccagttttattacccaatatgccgtaaccgcttatgccagccagcgctatcttgagaaacatcctattagccgtcctgacgaactcgaacatcactcctgtattttgatcgactcgatgatgatcgacgacgcgaatatctggcgcttcaacgtcgccgggagtaaagaggtgcgggattatcgcgtgaagggaaattacgtttgcgataacacgcaatcggcgctggagctggcacgaaatcacctggggattgtgtttgcgccagacaaaagtgtgcagagcgatctgcaagacggcacgctggtgccctgctttcagcacccgtatgaatggtggctggatctggtggctatcttccgtaaacgggaataccagccctggcgggtccagtatgtgctggatgaaatgctgcgtgaaattcgccaccagcttgctcagtcgcagcaactgcggcctgaacaagcggcggaaagcgaagattaatgatcgagataaaggtaatgcacccagctggtcatgcgtaataacactttgcgcatcaccgagacatggctgaaatgatcagagtagaccgccacctgagcgtaaataccgtctggtaaagcgctcaaatcagtgtgctcattcagttcaatggtcgcgataacgccatctgaacccggcgctgtgtttaacgtctgtaaggtgccggtcgactgataagctccgccgggaacagctggactaatggctgccagcttaccgctgaacactttgcctggcagagcgttaaataccacttccgcatcatcgccgggagccaggcgcagcaaggagttctgacggaactgcgccacgatttgtcgtttctgatcgggtataaacaccatcaccggacgtagcggcagcgacgcggcataggtacccggacgaatcagcacttgggtcacataaccatcgctcggcgcacgcactatcgtctgctcaaggttatattttgcttccgcgagctgcgctttcaggctggcgatttgagaatgttcacccaacaccaggctatccagctggctctggatctgtttttgttccgccgccgatgactttacggaggcttcctgcgccagataattttgccgtgccacatcaatatcgcgttctgaaaacgggtttactttcgcctggctgccgcgtgcgtaacgctggtactccttagcgaatttatcccgcgtggcctttgccttctgagtattcgccgccatctcatctaactctgcgcccaacgcccgctgtttatgttctgcggtaacgatatccgccatcagccgatccacccgcgcctgataacgcgtcgggtccagtcgaaatagcacctcaccttttttaatcagcgtatttttcttatccgtcacttctatcaccacgcctgtcacctgtgggacaacaggaatagaaataaccgctttttgcgctttaaaggtatacggatggttatagttcattaacagaattagaccgctgacaataaatattccacccagggccgctgtgggaatggtccatttatttacgggaattttgaagatcttaaacattgcccatgcaaaagccacataggtcaaaataatcagtaaatccataagtattactcggcagaagaggatttgatgtcggcgagctgtttctccagcccggcaatgcgctgttgcagttgcataacggatgaatcatggctttgcattccccatccccgctccgggcggtaaagcgtggcccaaatccacaaaaatggccagataacatgcagcgtaaaaagactcacccaaccagcaacatgaatggcgtcggcatgaggatgattacgttttttagcaatcaggtagggaatatcatgtaaaataataatcccatagaatatcaccagaaatacaaaaataagcactcccagtgcaaaatagtccaggaacatatttccctcagagaatataaaaaagaacaattaacgcatattatgaaatgccatgatgcaatgcaatttccttatttatataacgacatattgttttttatatactttctgaagtgtgctgcgtggctttttaacaggtcgaggcttatcatattgaaataatggaactatcagccaaactaatgaataacttcagtaaaacatccacaatgcagattaagcgtattaaaccttcaataatctaccgtttattgctgattgtcctcggaataccaatggtgatttacggtctggtttgcccgctcaccatcgaaacgcgagattaaactcctggcaaaacacgccccagaaacgcacttttgttggcgtagtctgggttattgcacacgtaggtttaaaacgtaaattgtaacaacgtgcgctttgtttatgccggatgcggcgtgtacgccttatccggcctacggtcaggtccccataggcatgataagacgcgtaagcgtcgcatcaggcaattaatacccgatgcgaccagcttcttacatcagaacagccccaacggtttatctgagtagctcactagcaggcacttggtttgctggtaatgctccagcatcatcttgtgggtttcgcgaccgatacctgattgtttgtagccaccaaacgccgcatgtgccgggtaagcatgataacagttggtccacacgcgcccagcctgtatgccgcgccccatcttataggccagattaccgttgcggctccagacgcccgcgcccaggccatattgcgtatcgttcgccagctccagcgcttcttccatcgttttgaaggtagtcaccgccagcaccgggccaaaaatctcctcctggaacacgcgcatattgttctgaccaaacagaatcgtcggttcgaggtagtagccgtctttcagttcaccttccagcagcttgcgccgcccgccggtgagcacatcagcgccctcttttttaccgatatcaatgtagttgaggatggtttccagttgcccgtgagaaacctgcgcacccatttgcgtcacgctgtcgagtgggttaccgctgcgaatgctttcgacacggcggatggcgcgttccataaagcgttcgtagattgactcctgcactaaggcacgactcggacaggtgcaaacttcgccctggttaaaggcaaacagtgcaaagccttccagcgctttatcgaaaaaggcatcttcttcatccatcacatcagcaaagaagatatttggcgacttaccgcccagctccagcgtcaccggaataatgttttgcgtggcgtattgcataatttgttgacccacttccgttgagccggtaaacgccactttggcgatgcgtttcgaggtcgccagatattcgccaatttccccacctgcaccgttgaccacgttcaccacgcccggcggcagtaaatcaccgacgatttccattagcagcagtacagaaagcggggtaagacgtgcgggtttcagcaccacacagttgcccgccgccagcgcgggagccattttccagctcgccatcagcagcgggaagttccacgggataatctgccccaccacgcctaacggttcatggaaatgataggccacggtttcgctatcaacttcactgatcccaccttcctgcgcccgaatacacgaggcgaaatagcggaaatggtcaatcgccagcggtacatccgcagcactggtttcgcgaatgggtttgccgttatcccaggtttcagctgtcgctaacagctcgaggttttgttccattcgatcggcaatcttaaacagaatcgccgcgcgatcctgcaccgaggtgtgcgcccatttatctttcactttgtgcgcagcatccagcgccagatcgatgtctcgtttgcccgaagacgccacttcgcacagcagctgcccggtcaccggcgtcaggttctggtaatactcaccatcggcaggggctacccattcgccgccaataaagttgtcatagcggttttttaacttgagggggaaaccatactcgccgggcttaatctgtgctgaagggggattattggtcatgatcgtctccttgcggtgtgaggtataacaagggtagacgtggctggcgaaatcttcgccagtcggtaacagcttttcgacggctatcacgaatttacgggcaagggttacagcggataatgcgcgaagtacacggcttgctggtcattaattttcttctcttgcgcaaacccttctttaacaattgtccgtaaatcagctcgagccgtattatcagagacgcccaggctcgcgctaatttcagcaactgtgtactctttccccggattggcgagcatcacattcaggagcgttacctggcgcggattcaggcgtttaagcacaccagagctaaacagcacactatcgagttttgcgcttcgttgtgtaatttcatcgatatgctgctgccagttttgcagagcacgtttaatgacacccgcctgatattcaaggaaataagtcagatccataccatctgattcagtgtactggtagctggcggcatatttgaccggtgcagcatgaagcaaacggctgatggaaatatatttaaagacatcgtagcccgatttcagcatataccagtaaaacagcgcccgactggtgcgcccgttgccatcccgaaacggatgttcatgggccagcataaaatgcagaatgcaggcacggaccaacggatgaatatacccttcatggctgtttaaccactggcaaactttttccagccgttccggtaacaatgccgcagcgggcggttgatgcactatattgccatcatagtcggcgatcacaacatcatctgtttcacgaaattctcccggacgatatttcgcgtcattgattccacccataccaatggcatgtaactggcgaataagcgcaggtgtcagcggttctgcgagtaagtgcggaatttccgccatcagccgggcatttcccgcaatcatatgctcgtcttcagtgcgtggcgaccgtcctgtttccagcatttttctcgccaccagcgttgtagtattcgcaccttccagctgggagctggtgatcggctcttccaggcgtaactggcttaactcggctccggccccgcgtaaccgttcagtctgatctttcagcgccagcgcggtagcacgtttgtcgacaagctcgcacgcttctgcaatcaccggggtaatgttgaatccggcctgttcacccgcttcattgcaataattaattcgttggatcgccgcgttgcgcgccagacgggtaagcgtccacgccacatcgacgttttctccttttttgatgcggtactgcaactcatcaaaaggcagataacgtcctttttcatcggtaacccggttaaagcgcaggtgggcctggagttcctcacccgataagtgtgataaaggaatcagcgtgggaggtgatttgatagccatttgcttatctcaaaaaagcgcaatattgagatagtgtatagcaggaaagagaaactatctcaaaaaaagcaagttttgagatagttgaaaaaatggcnnncaatttgccagccgttgtggaaatgatgattacatcgctgcgcgataaatcgccacaatttcttcgtgagttgcctggatcgggttagtaaagccacaggcatctttcagggcattagccgccagaaccgcgaaatcttcttctttcacgttcaggtcgcgtaggcctgccgggatatccactttcttcgccagttcacggatggcgttaatgcaggcttcagcaccttccgcgtcgtttttacctgtcacgttcacgcccattgcagcggcacagtcacgcagacgtgcagcggcgactttgctgttgaatacctgaacatgcggcagcagaacggcgttacatacaccgtgtggcaggttgtagaaaccgcccagctggtgcgccatcgcatgaacataacccagagaagcattattgaacgccataccggcgaggaactgggcataagccattgcttcacgcgctttcgcattactgccatcttcaacggctaacggcaggttttcggcaatcatggtcacggctttcagtgcacaagcgtcagtgatcggcgtggcggcaatagaaacatacgcttcgatagcgtgcgttaaggcatccatacccgttgcggcggtcagtgacttcggcataccaatcatcagagaggagtcattgacagaaagcagcggagtgacatgtttatcaacaatcgccattttgatatgacgcgcttcgtcagtgatgatgcagaaacgggtcatttcagaggccgtacccgccgtggtattgatggcgatcatcggcagctgcggttttgcagagcggtcaacgccttcgtaatcgcgaatatcgccgccattggctgccaccagcgcaataccttttgcgcagtcgtgtggagaaccaccgcctaaggagatcacgctatcgcaattattctctttaagtaatttcaaacctgcggcgacgttttccgtggtggggttaggttgggtgccatcataaataacgctaaaaatattgcgttcttccagtgctttttgcacatcgcccgccatacctaatttcgttaacatactgtcagtgacaattaaggtacgggtaaatccataatctgccatcatattcattgcatcagtcaatgaatcagcgccgatgacattcacagaaggaataaagaaagttgaagatgccataacacactcctgaaagtgtaaaaaagggtgggcagcttactgaggattttcattcgaaaacatgatcattattattaattatcnaaattaatctaataaaaagcacattgtattcattaaacaatgtgcttttttaaaatcataagaaatttgtattaannnnnnnnnnaanntaattaatcatttccttatttttccgnaannnnnnnnnnnnnnnnnnnnnnntgatcatttccacgacgacgcgtaaagccaatgcggtcaaaatattccagaatctgaattgccagctttcggcctacgcctaagcgatcgcggaaatccgccgcgcaggttgaaccacactcctgatcgagatcgcggatcatattggcaaattcgacaatccgatcgttacggtaataacgatctttgacgatcgcggtaattattccttgctgcgccgcctggcgtagcgtcaggcgcattgcctgctcgtcggtacccgtctcttttgccagatcacgcacccaccacggctcgtcaccaaacagcggctctgctttttgccagatggcctgctgctcttcgctgaagcccgctttgtgatccggcagatgcagccagccgtgatgactgaggatgtcgccgctttcgcgcatcttttcaatcagcaacagtactagcgcttcatcttccattggcaacgccatacgtcgcagacgttcgcgcccaggcccaggttcatcgcgatgttgctcatgataagtcgctaatgtgtcgagaattttccgttgccagcgagcggcaaccggcgcattcaacaagctataaccagcctgaatatagccaggctgttgcagcagttcgcgcatcccttcgccgttgagctggcgcgcccaggcgaaatcaggaagattaaccgcgccgcgttgcaggtgaacggctaacgcttcgctatcattctgtgccctggcgagggaagccaggcattgcagatactctggtttacgtttaccgcgacgcggcgggttaagcatcacgacgcgcgctccggccagcgtgttgcgggcagagatatcgcgcaataccaggcggtcgttatctgccagccataacggggtgtcgaagaccagttcagcaaggttatcttccagcagtgaaacgcgtcccgtgacgtggctggcggcgtggtgaatatgcagcggctgccactgggtcagcggtgtatgggtttgaagctcgacaatcacccgtgtgaacggctctggcggcacatcggcaagcagccagtcgccacggttaatctgctctttttccgcatcacccgcgatgttaagcgcgatacgctgcccggcattggcggtttctgttggctggttttgcgcatgcagcgcacgtacacgcatcggtttatttacaccagtcagccagagtgaatcgcctaccttcacttccccgcttaacgccgtaccggtgacgaccagcccggcaccttttacggtaaatgcgcggtcaatcgcgaggcggaaactatgttggctggcgtgctcgcgttccggcaactgaagcagatgctcgcgcagggcatcaattccccgaccttcggttgctgcggtgataaacagttttgcctcagcaaaaccgtattcccgcagaacctcctttacctggcgttcaacctcatcaacacgcgcttcgtctacgcgatcggctttggtcagcgccactgtcagcatcgggttaccggtcagctgcaaaatcgccagatgctcacgggtctgtgccatcacgccgtcatcgcacgccaccaccaacagcgcgtgatcgataccaccaacgcccgccagcatgttggaaagaaacttttcatgaccgggtacgtcgataaaaccaggcacgcgaccatccggctgcggccagtaggcatagccgagatcgatggtcatgccgcgctttttttcttccggcagacggtcagcatttacgccagtaatcgcctgcaataaggttgttttgccgtggtcaacgtgtccggcagtcgcaataatcatttcaacaacatctccaaaaaccgttgctcatcttcaaggcagcgtaaatccagccacaatcgtccgtcataaatacgaccaatcaccggcactggcaattcacgccagcgggcggctaatgactcaaggtggctaccgcgtccatcatggggtgtaaacgttaatgccgcgctcggcaggcgatcaaccggcagcgaaccactgccaatctgcgaaagacatggcataacctgtaccgcaaactccgcgccgtaatgtgcggcaaggggagcctgtaaacgttgtgcctggatttgaatgacctctgcgctgcgggtaagcaggcgcagggtcggtaatttttcactcagagcttcagggtgtaaataaagacgcaacgtggcttccagcgccgngagggtcattttatccgcgcgtaatgcacgcttcagcgggtggctttgcaggcgggcgatcatctcttttttaccaacgataatccctgcctgcggcccgcctaacaacttgtcgccggagaagctcaccagactgacgcccgccgcaatcaactcctgcggcattggctctttcggcaaaccgtactggctaagatcgaccagcgagccactgcctaaatcagtcactacgggaacatccagctctttgccgagcgccaccagttccgcttcatctatcgctttggtgaacccctgaatgctgtagttactggtatgtactttcatcaacagtgcggtattttcattcaccgcctgacgataatcattcgcgtgcgtgcggttggtggtccctacttcgtgtagggtgcagcctgcctgacgcataacatcgggaatacgaaacgcgccgccaatctccaccagttcgccgcgagataccaccacctcttttccgctggcagtggccgccaacatcaataacaccgccgccgcattgttattgacgatacaggcatcttccgcccccgtaatnnnncacagcagctgcgccagcgcccgatcgcgatgtccgcgtccggcgtcgtccagatcgtactcgagggtcactggcgaacgcatagcctgcgcaacggcttccaccgcggcttccgcctgtaaagctcgcccaaggttggtatgcagcacggttcccgtcaggttgatcaccggacgcagcgcgctctgcgcttctttcgtcaaccgggcatcgacttcttgcgcccagttttcacaccacgcaggcagcgtctggctgccacgaatcacttctcgcgcttcgtcgagcatctgacgcaacaattccaccacgcgggtgtgaccataagtatcacgcaaagaaaggaaggagctatcgcgcaataagcgatcaatagccggaagttgactatagagggaacgcgtttcggttgtcataggaaacctggctgatcaaggccctctcacacggagaagggcgtttaacataaccacggattgtaacgtgagatgggtcaggaggacatatcgcgcatcaagcctttggcggttcggtgcgagcaaaactttcgcggctaaacaggttttcgaccagtttgactaagtgtgggcggtcgacacaccaacctggcgcaacgcggcggaaattgagatatccgacggcacaggcaatggcgatagtcgccagattgaccgtatcggttttgagtgtgccatcgaccagatatccttccagcacatccagactgcggttgattttctcccgctggcgtaacaattcatcttcagactgctgcgccgctggacgcgcctgttcacgcaccgataccagcccggcatccataatgccatccgccagtgcctcaattttgcgcacccgcaacgactccagcggatcgcgcggcaacatcgccggagcgacattcattaattcaatatattcagcgatgatcggcgaatcaaaccagcattcgccctcttcggtcaccagcaccggcacttttcctaacgggttaaattgcgtcacgccgttgtccgcgttatagggcagttcattaataaattcgaaagttatgcccttttctaacaacagaatagaaagtttgcgtacaaacgggctggtgtagctaccgacgagtttcatgccgagtcctttgtgcgaggaaaaatatcagtatggcctggtgatgggaaaaagggcagaaaatgttgatggtttgttacttccaaataaatcacatatttatcatggtgatataaatattttcctaattgtttctatctgatggatatctcacttaaggctttcttataaatctgtagggttttgcctggaagcagacaaataacccgataaaacaaggatgagcagatgagcggaaaaccggcagcgcgtcagggcgacatgacgcagtatggcggtagcattgttcagggttcagccggggtgcgcattggtgcccccaccggcgtggcctgttcggtgtgccccnnnnnnnnnnnnnccggccatccggtcaatccgctgctgggtgcaaaggtccttcccggtgaaaccgacatcgccctgcccgccccgctgccgttnnnncnctcccgcnnnnnnagcagttaccggacaaaaacgcccgcgnnnntgnggagcctcggccccggctggaaaatgcctgcggatatccgcttacagctgcgcgataacacactgatactcagtgataacggcggcagaagcctgtattttgagcacctgtttcccggtgaggacggttacagccgcagcgagtcactctggctggtgcgcggcggcgtggcgaaactggatgaaggtcaccggctggccgcactctggcaggcgctgccggaagaactccgcttaagtccgcatcgttatctggcgacaaacagtccgcaggggccgtggtggctgctcggctggtgtgagcgggtgccggaagcggatgaggtgctgcctgcgccgctgccgccgtaccgggtactgaccgggctggtggaccgcttcgggcgcacacagacgttccaccgcgaagccgccggtgaattcnnnngcgaaatcaccggcgtgacggatggtgccgggcgtcacttccggctggtactgaccacgcaggcgcagcgggcagaagaagcccggnannnnnnnnnnnnnnnnnnnnnnnnnnnnnnnnnnnnnnnacggaaccgtccgcttttcctgataccctgtcgggttacaccgaatatggccgggacaacggcatccgtctgtctgccgtgtggctgacgcacgacccggaatacccggagaatttacctgccgcgccgctggtgcgctatggctggacnnnnnnnnnnnnnnnnnnnnnnnnnnnnnnnnnnnnnnnnnnnnggcggtggtgtatgaccgtagtggcaaacaggtgcgcagctttacttacgatgataaataccggggccggatggtggcgcaccgtcacacgggccggccggaaatccgttaccgttacgacagcgacgggcgggtgacagaacagctaaacccggcaggcttaagctacacgtatcagtatgagaaagaccgcatcaccatcaccgacagcctgaaccgccgtgaagtcctgcacacgcagggtgaaggcgggctgaagcgggtggtgaaaaaggaacacgcggacggcagcgtcacgcagagtcagtttgacgcggtgggcaggctcagggcacagacggatgccgcaggcaggacaacagaatacagcccggatgtggtgacgggcctcatcacgcgcatcaccacgccggatggcagggcatcggcgttttactataaccaccacagccagttaacgtcagccaccgggcctgacgggctggaaatacgccgggaatatgatgaatggggccgtctgattcaggaaactgcccctgacggcgatatcacccgctaccgttatgataatccacacagtgacttaccctgcgcaacggaagatgccaccggcagccggaaaaccatgacgtggagccgttacggtcagttgctgagcttcaccgactgttccggttatgtaacccgttatgaccatgaccgcttcgggcagatgacggcggtgcaccgcgaggaagggctgagtcagtaccgcgcatacgacagccgtggacagttaattgccgtgaaagacacgcagggccatgaaacgcggtatgaatacaacgccgccggtgacctgaccaccgtcattgccccggacggcagcagaaacgggacacagtacgatgcgtggggaaaagccatctgtaccacgcagggcggtctgacgcgcagtatggaatacgatgctgccggacgggtcatccgcctgaccagtgaaaacggcagccacaccaccttccgttacgatgtactcgaccggctgatacaggaaaccggctttgacggccgcacacagcgttatcaccacggcctgaccggcaaacttatccgcagcgaggatgaggggctggtcacccactggcactatgacgaagcagaccgcctcacgcaccgcaccgtgaagggtgaaaccgcagagcgctggcagtatgacgaacgcggctggctgacagacatcagccatatcagcgaagggcaccgggtgacggtgcattacgggtatgatgagaaaggccggctgaccggtgagcgtcagacggtgcatcacccgcagacggaagcactgctctggcagcatgagaccagacacgcttacaacgcgcaggggctggcgaaccgctgtataccggacagcctgcccgccgtggaatggctgacctatggcagcggctggctggcaggcatgaagctcggcgacacaccgctggtggatttcacccgcgaccgcctgcaccggaaaacgctgcgcagattcggccgttatgaactcaccaccgcttatacccctgccgggcagttacagagccagcacctgaacagcctgcagtatgaccgcgattacacctggaacgacaacggcgaactcatccgcatcagcagcccgcgccagacccggagttacagctacagcgactccggcaggctgaccggcgttcacaccaccgcagcgaatctggatatccgcatcccgtatgccacggacccggcaggtaaccgcctgcccgacccggagctgcacccggacagcaccctcagcatgtggccggataaccgtatcgcccgtgacgcgcactatctttaccggtatgaccgtcacggcagactgacagagaaaaccgacctcatcccggaaggggttatccgcacggatgatgagcgcacccaccggtaccattacgacagtcagcaccggctggtgcactacacgcggacacaatatgcagagccgctggtcgaaagccgctatctttacgacccgctgggccgcagggtggcaaaacgggtgtggcgacgtgaacgggacctgacgggctggatgtcgctgtcacggaaaccgcaagtgacctggtacggctgggacggcgaccggctgaccacgatacagaacgacaggngccgcatccagacgatttatcagccggggagcttcacgccactcatcagggttgaaaccgccaccggtgagctggcgaaaacgcagcgccgcagcctggcggangcgcttcagcagtccggcggcgaagacggtggcagtgtggtgttcccgccggtgctggtgcagatgctcgaccggctggaaagtgaaatcctggctgaccgggtgagtgaggaaagcnnnngctggctggcatcgtgcggcctgacngtggngcagatgcaaanccagatggacccggtntacacgccggcnnnaaaaatccacctgtaccactgcgaccatcgcggcctgccgctggcgcttatcagtgcggaaggggcaacagaatggtgcgcagaatacgatgaatggggcaacctgctgaatgaagagaacccgcatcagctgcagcagcttatccgcctgccggggcagcagtatgatgaggagtccggcctgtattacaaccgccaccgctattatgacccgctgcaggggcgatatatcactcaggatccgattggactgaaggggggatggaatttttatcagtatccgttgaatccggttcagtatatagaccctttgggattagatctattatcattaccttctcccagacaaaaacctgtaagtcaatcctgtactattgatcctataactcaacaacctgttggtaggtttataggtgattctaaaggcaatattatggttgaaccggtaggtggcagaacaatcccgtatccccccagtaatccaggaagtgcagatactcacactctttatcagaataattcaaatgcttataggcttaatccaatagggcatgcaaacaattcaacaccacatgcacatgcacatttaccaggaacaggtagcggtatgaaaggccaaggtccatcccttgatgttaatggtcgcgttgtaccatggaatagtagtgccgcacatatcggtattagatcactcggtacactaagcttttttagttctgttttacatatgtttacacttagatcatgtaaagagggaacgtttggacaatgttattgtgctatgtatgttgaaatgtcaacgggaagcaatcaagatgaggctgatataatgtgcggaatgcctgagtatttttagaatagggggggaatatgtttgatagaatatatcttggtgatcgagcantaaaaaaaattgaatttgatttatggagtaaacaaattagaattcaggttaatttaatctcaaggatagcctatggtacaacagaatggaatttttatgataatgaagacttagaagatggttatttggtattttcagatgttagtttcttcaatataactcctaatggctctattccagatgattatataatttcaataattacagataatgtcaatgttgaatattttgaatcaactatagttgcagttggacaaattccaaatacaaattctggagacattgataatattggtgagtgtcaaattttcatcaggtataaacacagctggattgagaataaattcaaagaaaaaataattcaataaccatgttatgtatagacattttagatggaacgaaccagaggaaggcatgcctccgacttgggttatatgggcacggagttttagtgtagtgaactcaacgacgcaaaccgaataacctgccgctggcgcttatcagtgcggaaggggcaacagaatggtgcgcagaatacgatgagtggggcancctgctgaatgaagagaacccacatcagctgcagcagcttatccgcctgccgggtcagcagtatgatgaggagtccggcctgtattacaaccgccaccgctattatgacccgctnnnnnngcggtatatcactcaggatccgattggactgaaggggggatggaatttttatcagtatccgttgaatccggtcataaatgtagatccgcaaggtttggttgatataaatttataccccgaaagtgatcttatccattctgtagctgatgagattaatatcccaggcgttttcacaatcggggggcatggtacccccacatctattgaatccgcaacgcgcagtatcatgacagctaaagatctagcatatctaattaaatttgatgggaattataaagatgggatgacagtttggttattttcttgtaatacaggtaaaggacaaaattcatttgctagccaattagctaaagagttacatacaaatgtaataggacctgacacgctatggacgtggtgggggcgaggaactaatggtaagttaaaaatggatacagtgctaacagcaccaacgaaccttaattcaaataaggatctaatggctataacaacaaaagaccttggtaattggataacatatgggccatctgggcaccccatttctaatatgcaaggtacgccagaaaaacccagtgatataagataggttgtagatgtatgaaagcatgcttgttactatttttttatttctcttttatttgtcaattgcatggtgctgatgtgaaaataaaacaaaacgaaagtatgatggggtctacagcaatgacctatgatttaagtgaagaaaagttgatgaaactgaagtataaatcacaacatggtgattcagaggcatcatttcgactatatcaatattactgctttactaaaaataacatttacaaacaattgcgatacttagaaaaatcagcatctcaggggaatgttacagcgcagtttaattatggggtctttttatcagatacaaatccaacattatcagaatattataatttgaatagagctatttattggatggaattcgctgtaaataacggtaatattgatgcaaagagcaaacttcaagagctcaaaaagctaaagcgaatggatagaaggaagaataaggagaatccgtaaaagcaatagttcatcagactgccgcagcagtagtatgatgatgaatcagggctgtactataactattatcggtaacattaaccgcagcaggggcggtataacactcaggctccgattgggctggaaggtaggtggaatttttatcagtatccgttgaacccgatttctggaatcgatccccttgggattagccacctgtttatacagcataactttaggtatgctttcgtgtgtttcagatataccatgtgatgataatttttatgatgtgcttagtattccagtcgcttctggtaataatatgcaatgtaaaaataatccccgttgtacacatttataaatagatggccaatacctcaaggcctatggagttggaatgttaatgacccgggagcaagcaatagaaaacctgacggcatacgattagtaccgtcagttaatacaggaacttataatcgcaatggattttcaatacatagttgtttaaacgcttttggtccgtctttaggacctcgattctgttccgagggttgtataactggtttatctaatgacatgcaaaaattaaatgagttaatattttcagagccagatagcacattaacagttacggactaaaaaatatggcaaggttattaacaattgtatttttttctctatttctgcgagtgcagttactgcaagacaatttcagagagagttagatttggcagacaaagcaatattatgggcactaatatcagccagtactaaagagggacgaaaagcgtgttcactaagctattttgcctgtaaggccgcagaggctgaactcggactggcatatatggctgcgaatgataacaaggaatttctcacatccttatctaatataatgannnacaaaatagatgctggactttccgaatcctatacatgctatttattaagtaagggaaagatcataagaccatatctgaaaaatctaaatccactccaacttgccgctgattgcattgaaacagtaaataaaataaaagataagaataaaaaaatcattgatataaattcagttaatatttgcagtgatgataaaaatataaaattgagagttaatagtactattatggccattgatgattctataaaatgcatcgataaatgataacttaattttatttaaaaatatattaataactcactctccaggagttttttaacttagttttataatgaatacgataattaaaagtgaagaagaaaatagttgtatacatatattccatgaccctacattgtgatctatagattaaatattttttaaatgtgactgtcatccttcagataataaagccatcatcgcaatagatggaaaagcactcctgctcttttttgattagagccgtcgcaggaggaacaactcatatcatcattgcgatctcgacgatgtatagtctcatcctgcggcagaacaagacggataaaaaatccaatgagagcacactcatccagaacttattaacataatgaatattaaagaaaaatcatcgcagctaatgaagtaatatgcaaaaataattagtccttacaaggagcaaagttccataatctcccccctccccctcaatgatccaaataaagataatgcatccagctggtcattcttagcagcactttccgcatcaccgaaacatggctgaaatggtcggagtaaaccgccacctgggcgtagatgccgtcgggtaaggcatcgatatcatcgttagggtccagttcaatggttcccagcacaccgtccgtgccgggcacgaccgttaatgattgcaataccccctgcgcctgataagaaccgcctggcacgacaggtaaaatactagtcagtttgccgtgaaacacctgcccaggtagcgcgttaaacaccacttccgcatcatcgccgggtttcagacgtaacagcgagttttgccgaaattgggcgacaatttgccgtttttgctcggggatgaagaccatcaccggacgcagcggcaaggcagctgcgtatgtacctgggcggatcagtacctgagtaacgtagccattgctcggcgcgcgaatgacagtctgctcaaggttatattttgcttcagtaagttgcgctcttaagctcacaatctgcgattgctcgccgttaaccatactgtcgagctggctctggatctgcgcctgctccgccaccgagcctttcaccagcgcatcctgcgcgaggaaattttgccgcgcatcgtcgatgtcacgttccgagaacggattcaccgccgcctggctgcctttcaagtaacgttgataatttttaaacagacggtcgcgctccgctgaaacctgggtggtgttggcctgcgcttcagtgagctgcgcacgcagcgtctttatattatgcgtcgccgtcatcaggtcagcctgaagtctgtcaactcgcgcctggtaacgaaccgggtcgagcttaaaaagcacctcgcccttttgaataagctgattattcttgtcagtgacttcagtaacaattcccgtcacctgtggcgtgatagggatcgctatcactgccttttgcgcggtaaaagtgtaagggtggttgtagttcatcaataaaatcaaaccactcaccagaaacacgcctcccagcgccgccgtcgccagcgtccactgatttaccggaatgcggaagattttaaagaccgcccacgccagcgccacgtaagttaaaacaatcaatagatccataattagatctccgggaacgtggaatagtcagtctttttctcggcggcgagttgatgctccagccgggaaattcggtcagaaagtgaggcgatttccgggtcagtcgctttctcctgcgacgcaacatgtgactgcataccccagccacgctccggttgatagagcgtcgcccagatccacagaaacggccagataacatgcagagtaaacaggctcacccagcccgccgtatgaatagcgtcggcatgggggtgattgcgctttttggcaatcagataagggatgtcatgtatcgcgatgattccataaaaaatcaccagaaagacgaagatcagcactcccaacgcgaaatagtttagaaacatatctgcctcggattcacgtttatcagtgttgtttttgggctggcagccagaagggagtcaggctgatattttgacaataatccgggttcgcgattctcgccataacaccaaagaataatttttagaggtgatgagttgcttagttacataacgattgtatgacgaaggcataacatgctgtagatcacatcaggtgaacgccgtaagaaaatatcttgtgattcagatcacaaagattcaacaaaccatcaaaacaaaaatgtgacactactcacatttaaatgccatttttagcgaaaatcgccgccttgttgcttttttacacaagcgttttgtgatgaacgtcacgtcaattacctctctaccccctatatttatgtgattgatatcacacaaaaggccgtcgactggacagttaaccgattcagtgccagatttcgcagtatctacaaggtccggctacctctgccgccacattaacaaaaaacctcgggcttccagcctgcgcgacagcaaacataagaaggggtgtttttatgtcatccgatattaagatcaaagtgcaaagctttggtcgtttcctcagcaacatggtgatgccaaatatcggcgcgtttatcgcgtggggtatcatcaccgcgttatttattccaacagggtggttaccgaacgagacgctggcgaagctggtcgggccgatgatcacttatctcctgccgctgctgatcggttataccggtggtaagctggtaggcggcgaacgtggcggcgtagtcggtgccatcaccaccatgggcgttatcgtcggcgcagacatgccgatgttcctcggttctatgattgcaggtccgctgggcggctggtgcattaagcacttcgaccgctgggtagacggtaagatcaaatccggttttgagatgctggtgaataacttctccgcaggcatcatcgggatgatcctcgctattctggcattcctcggcattggcccgattgttgaaaccctgtccaaaatgctggctgcgggcgttaacttcatggttgtccatgacatgctgccgctggcgtctatctttgttgaaccggcgaaaatcctgttcctcaacaacgccattaaccacggtatcttctcgccgctgggtattcagcagtcccatgaactgggtaaatcaatcttcttcctgattgaagctaacccaggtccaggtatgggcgtgctgctggcgtacatgttctttggtcgtggtagcgctaaacagtctgcgggcggtgcggcaatcatccacttcctgggtggtatccacgaaatctacttcccgtatgtgctgatgaatccgcgtctgatcctcgcagtcatcctcggcggtatgactggcgtgttcacgctgactatcctgggcggtggtctggtttctccggcatctccgggttctatccttgctgtactggcgatgacaccaaaaggtgcttatttcgctaacatcncgggtgtgtgtgcggcgatggctgtctccttcgttgtctctgctattttgctgaaaaccagcaaagtgaaagaagaagatgatattgaagcagcaactcgtcgtatgcaggacatgaaagctgagtctaaaggtgcatctccgctgtctgcgggcgatgtgactaacgacctgagccacgtacgtaaaatcatcgttgcctgtgacgccggtatgggttccagtgcgatgggcgcaggcgtgctgcgtaagaaaattcaggatgcaggtctgtcacagatttcggtcactaacagcgcgatcaacaacctgccgccagatgtggacntcgtcatcactcaccgtgacctgaccgaacgcgctatgcgccaggttcctcaggcacagcatatttcgctaaccaacttcctcgacagcggcctgtacaccagcctgactgaacgtctggttgctgcccagcgacatactgaaaacgaagtgaaagtgaaagacagtctgaaagacagctttgacgattccagtgctaacctgttcaaactgggcgcggagaacatcttcctcggtcgcaaagcagcaaccaaagaagaagcgattcgttttgctggcgagcagctggtgaaaggcggttacgttgagccggagtacgttcaggcgatgctggatcgtgaaaaactgaccccgacttatctgggtgagtctatcgcggtgccacacggtacggttgaagcgaaagatcgcgtactgaaaacgggcgtggtgttctgccagtacccggaaggcgtgcgcttcggtgaagaagaagatgacattgctcgtctggtgattggtattgctgcccgtaacaacgagcacattcaggttatcaccagcctgaccaacgcactggatgatgagtccgtcatcgagcgtctggcacacaccaccagcgtggatgaagtgctggaactgctggcaggtcgtaagtaatccaatcctaccctctcctcacggagagggtttgggtgagggaaaagcctcaccccagccctctcgggtaaaaacattgatgaaggttaatactatgaaagcattacattttggcgcaggtaatatcggtcgtggctttatcggtaaactgctggcagacgcgggtatccaactgacgtttgccgatgtcaatcaggtggtacttgatgccctgaatgcccgtcatagctatcaggttcatgtggtcggtgaaaccgagcaggtagataccgtttccggcgtcgatgctgtcagcagcattggtgatgatgtcgttgatctgattgctcaggtcgatttagtcactaccgccgttggcccggttgtgctggaacgtattgctccggctatcgccaaagggctggtgaaacgtaaagaacaaggtaatgaatccccgctgaacatcatcgcctgtgaaaacatggtacgcggtaccacgcagctgaaaggtcatgtgatgaacgccctaccagaagacgccaaagcgtgggtagaagaacacgttggctttgtcgattccgccgttgaccgcatcgtaccgccttcggcttcggcaactaacgatccgctggaagtgacggtagaaactttcagcgaatggattgtcgataaaacgcagttcaaaggcgcactgccgaacatcccaggcatggagttaaccgacaacctgatggcatttgtcgaacgtaaactcttcaccctgaacacgggtcatgctataaccgcgtacctcggaaaactggccggtcatcagaccattcgtgacgctattctcgacgagaaaatccgcgcggtggtaaaaggtgcgatggaagaaagtggtgcggtactgatcaagcgctacggctttgacgcagacaaacatgcggcgtacatccagaaaatcctcggtcgttttgagaacccgtatctgaaagatgatgtagagcgcgtaggccgtcagccgctgcgtaaactgagtgctggcgaccgtctgatcaagccattgctcggtacgctggaatacagccttccgcacaagaatctgattcaggggattgctggtgcaatgcacttccgcagtgaagacgatccgcaggctcaggaactggcagcactgatcgctgacaaaggtccgcaggcggcgctggcacagatttccgatcttgatgccaacagcgaggttgtatccgaggcggtaaccgcttataaagcaatgcaataatggtggaccaggcgcaggacaccctgcgcccgaataacagattgtcagatatgcaggcaacaatggaacaaacccaggcctttgaaaaccgtgtgcttgagcgtctgaatgctggcaaaaccgtgcgaagctttctgatcaccgccgtcgagcttttgaccgaggcggtaaatcttctggtgcttcaggtattccgcaaagacgattacgcggtgaagtatgctgtagaaccgttactcgacggcgacggtccgctgggcgatctttctgtgcgtttaaaactcatttacgggttgggcgtcattaaccgccaggaatacgaagatgcggagctgctgatggcattgcgtgaagaactaaatcacgacggcaacgagtacgcctttaccgacgacgagatccttggcccctttggggaactgcactgcgtggcggcgttaccaccgccgccacagtttgaaccagcagactccagtttgtatgcaatgcaaattcagcgctatcaacaggctgtgcgatcaacaatggtcctttcactgactgagctgatttccagaatcagcttaaaaaaagcctttcaaaagtaagcaacgtctgcttactgcccctctacctgcttcggccgataaagccgacgataatactccagacgttgtagatataacggcacgctttcatcgggtattccggacggaatcgcgttacggggaggaagttttttcagatactcccggaacgcctggcttgatgccatgaaatctacggctttatcgataagaagcggaacgttttcacctaatttgcccatgatgatatctccgtattaccccgcgccgggaatgcgcggccgccaattttagtttaggttcccggtaaagatgacattaaggaaaacgtgctgaatcctcaataatcatccgctgctgtttattatcttttttctatagatttcttaattaatcaataaattgcgtagtttttaagcatgttaatgattacgttacagaactattgcaatgtcatcagttgtgaacaaagcacctggtcgcgcatactaggggctataaatttatctttatcagaagccatcacatgaaagaagtcgaaaaaaacgaaatcaaacgtctcagcgatcgtctggacgccatccgccaccagcaggccgatctgtcgctggttgaagccgcagacaaatatgccgagctggaaaaagagaaagccacgctggaagcagaaattgctcgcctgcgtgaagttcatagccaaaaactgagtaaagaagcacagaagctgatgaagatgccgtttcagcncgcaattaccaaaaaagagcaggctgatatgggcaagctgaagaaaagtgttcgcggactggtggttgtgcacccaatgaccgcgctgggccgtgaaatgggcctgcaggagatgactggattctctaagactgcgttttaagcgcctcagacgactggttcgatcatatcaacccgcatctggcttgccttagctggtcaatgcggggactctcctgtctactcgcctaattaccaaacaattcactccctttacgtcgatttaccgctggttgatattctgaaaatgcatttttaccgaaatagccacctataaacaataaaaatatatagaagatatcatttattaattaacaagcagttacgtctctttttttcggatttaattgtgaaattttaatcatcatattcatacaataaattatctgtaaattttttcccagacatggtttctttcatatttgacatttattaataatcatcattagaatccacgaaaataatatattcatacaaacacagacatcttttgaaacgaatgatacatttttatgatgaatgcttaaaacaatatttaatcgacacacatcactgtcattaatgtaaagcaacatagatcaccaataatacaatggacaactctaccggcattgatcgctgggcggaggaaataaggatttttacatgaactagaagaagatttttttcagtgctgtcactgtttcagttctctgcgcattaacgggatgtgactacattgaagaaggcaagccagaaagtagtttattgaaacaacaagaagaacataacaataaaattgatctacttgaaaaacaacaagcacagctaaagagtcaactggaaactattcaaaaacaacaaactggcataataagcagtacaaagactttaactcacgtaattaaatccgttaaagatcaacaaaacacttttatttttaccgagtttaacccagcaaaaacgaagtatttcatcctgaacaatggttcggtggctttagcgggtcgagtgttatccattgacgccacagagaatggcagtgttattcatatttcactggtcaacttattaagtacacctatctcaaatattggttttaatgcgacatggggtggtgaaaaacctgtcgatgccaaagagtttgcccggtggcaacaattacttttcaacacatcaatgaaatccacattgaaattattaccaggtcaatggcaagacattaatttgaccctgaagggtgtatcgcccaataacctgggatatctgaagttagccatcaacatggaaaatattcagttcgacaatcttccctctgctgaaaatcggcagaaaagaagcaaaaaataaatgcagttagtacgcttataacaaggaatagcgagcatcattaatgaacaaaatatttaaagttatctggaaccctgcgacagggaattatactgttaccagcgaaacggcaaaaagccgtggcaagaaatctgggcgcagtaagctgttaatttctgcgctggttgcgggtggaatgttgtcgtcgtttggggcattggcgaatgccgggaatgacaacggtcagggtgttgattacggtagtggatcagctggcgacggctgggttgctataggcaaaggggcgaaagcaaatacttttatgaacaccagtggttccagtactgctgtgggttatgacgctatagctgaaggccaatatagctctgccatcgggtcaaaaacccatgcgattggtggtgcatcaatggcctttggggttagtgcaatatcagaaggcgatagaagtatagcactgggtgcctcttcgtattcattgggccaatactcaatggccctcggccgttattcaaaagcattgggtaaattgtctattgctatgggggactcttccaaagcggaaggagcaaacgccattgccctgggaaatgccactaaagctactgagattatgagtattgctcttggcgacaccgccaatgcgtcaaaagcgtattcaatggcgctgggagcaagtagcgtcgcatctgaagaaaacgctattgcgataggtgctgagaccgaagccgctgaaaatgcaactgctattggcaataatgcgaaggcaaaagggactaatagcatggcaatggggttcggaagccttgccgataaagtcaatactatcgcattaggaaatggcagccaggctctggcagataatgcaatcgccataggccagggcaacaaagctgatggcgtggatgccatcgctctgggtaatggtagccagtcgagaggcttaaacaccattgccttaggcacagccagtaatgcaactggtgataagagtcttgcgcttggtagtaatagcagtgccaacggtattaactctgtcgcgctgggcgcagattccattgcggatttagacaataccgtctctgtcggcaatagttcattaaaacgcaagatcgttaatgtgaaaaatggcgcgatcaagtctgacagttacgatgccattaatggttcacagctttatgccattagcgactcggtagcaaaaaggcttggaggaggggctgcagtagatgttgatgacggtactgttacagcaccaacctacaatttaaaaaatggtagcaaaaataacgtaggggctgcgctcgctgtacttgatgaaaacaccctgcaatgggaccaaaccaaaggcaaatacagcgctgctcatggtactagtagcccaactgccagcgtaatcaccgatgttgcggatggcacgatttcagcctccagtaaggatgcggttaacggttcccaactgaaagctaccaatgacgatgtcgaagccaacaccgccaatatcgctactaataccagcaacattgccacgaatacggcaaatattgccaccaataccaccaatatcaccaacctgacggattccgttggtgaccttcaggctgatgccctgctctggaacgaaactaaaaaggcattcagtgcagctcacggccaggataccaccagcaaaatcaccaacgttaaagatgccgacctgacggctgacagcactgatgctgttaacggctctcagctgaaaaccaccaacgatgctgtggcgacgaataccaccaatatcgccaataacacttccaatattgccactaacaccaccaacatctctaacctgactgagacggtgactaatcttggtgaggatgcgctgaaatgggataaggacaatggtgtattcacggcagctcatggcaccgagaccaccagcaaaatcaccaacgttaaagatggcgacctgacnactggcagcaccgatgccgttaacggctctcagctgaaaaccaccaacgatgccgtggcgacgaataccaccaatatcgccactaacaccaccaacatctctaatctgactgagacggtgactaatcttggtgaggannnnntgaaatgggataaggacaatggtgtcttcactgcagctcatggcaacaataccgccagcaaaatcaccaatatcctggacggcacagtcactgcaaccagttccgatgccattaacggtagccagctttatgacttaagcagcaatatcgccacctacttcggcggcaatgcttctgtgaatactgacggtgtgtttaccggtccaacctacaaaatcggtgaaacaaattattataacgtcggcgatgcactggctgcgattaactcctcatttagcacgtctctcggcgatgctctgctttgggatgccaccgcaggtaaattcagtgccaaacacggtactaatggtgacgcaagcgtgatcactgatgtcgcagatggtgaaatttcagactccagttctgacgcagtaaacggctcacaactccacggcgtgagcagttatgttgttgatgcgctggggggtggtgccgaagtcaatgcagacggcaccatcactgcgccgacgtacaccattgctaatgctgattacgataatgtcggtgatgccctgaatgctatcgataccactcttgacgacgctctgctctgggatgcggacgccggtgaaaatggtgcatttagcgccgctcacggaaaagataaaactgccagtgtaatcactaacgtcgctaacggtgcaatctctgctgccagcagcgacgcgattaacggctcacaactctataccaccaataagtacatcgctgatgcgctgggtggtgacgcagaagtcaacgctgacggcaccatcaccgcaccgacttacaccattgcgaacgccgagtacaacaacgtcggtgacgccctggatgcgcttgatgataacgccctgctgtgggatgagactgccaatggcggtgctggagcctacaatgccagccatgacggtaaagccagcatcatcactaatgtcgctaatggcagtattagtgaggacagtaccgatgcagtgaacggttctcagttgaatgcgacgaatatgatgattgagcagaacacccaaattatcaatcagctcgctggtaacaccgacgcaacctatatccaagaaaacggtgcgggtattaactatgtgcgtactaacgacgacggcttagcgttcaacgacgccagcgcacagggtgttggcgctacagctataggttataactctgtcgccaaaggcgatagcagcgtagctattggtcagggcagctacagcgacgttgatacgggtatcgccctgggtagcagctctgtttccagccgagtgattgccaaaggctcccgtgacaccagcataacggaaaatggcgttgttattggttacgacaccacggatggcgaactgctcggtgcattgtctatcggtgatgacggtaaatatcgtcaaatcatcaacgtagccgatggttccgaagcccatgacgccgttacggttcgtcaattgcagaatgcgattggtgcggtcgcaaccacgccgactaaatacttccacgctaattcaacggaagaagattcactggcagtgggaactgactcgctggcaatgggtgcgaaaaccatcgtgaatggcgataaaggtattggtatcggttatggtgcctacgtggacgcgaatgcacttaacggcattgccattggtagcaatgcgcaagtcattcatgtcaacagtattgcgataggtaatggttctacgaccactcgtggcgctcaaaccaattataccgcctacaacatggacgcaccgcagaactctgtcnnnnnnttctcagtcggtagtgcggatggtcaacgtcagatcactaacgtcgcagcaggttcggctgataccgatgcggtcaacgtgggtcagttgaaagtaacggatgcgcaggtttcccagaatacccagagcattactaacctggataatcgggtaacgaatcttgattcacgcgtcaccaatatcgaaaacggtattggcgatatcgtcaccaccggtagcaccaagtacttcaagaccaataccgatggtgtagatgccagcgcgcagggtaaagatagcgtcgcgattggttccggctccattgctgccgctgacaacagcgtcgctctgggtacagggtctgtggcaaccgaagaaaatacgatctctgtaggttcctctactaaccaacgtcgtatcaccaacgtagctgcaggtaaaaatgctaccgatgctgttaacgtggcacagttgaagtcttccgaagctggcggtgtacgttacgacaccaaagctgatggttctatcgactatagcaatatcaccctcggtggcggcaacggcggtacgactcgtatcagcaacgtctccgctggcgtcaacaacaacgacgcggtgaattacgcgcagttgaagcaaagcgtgcaggaaacgaagcaatacaccgatcagcgaatggttgagatggataacaaactgtctaaaactgaaagcaagttgagcggtggtatcgcttctgcaatggcaatgaccggtctgccgcaggcttacactccaggtgccagcatggcctctattggtggcggtacttacaacggtgaatcggcagttgctttaggtgtatcgatggtgagcgccaatggtcgttgggtctacaaattacaaggtagtaccaatagccagggtgaatactccgccgcactcggtgccggtattcagtggtaatgatccattaagttagtgtgactaagggcaaacgccaaattgcctgatgcgttacgcgcatcaggcaagataaggcgctccgggtcaacaatctaagggcaattctctgatgaggattgcccttttctttaccanacatctccccccacaagaattggccctaccaattcttcgcttatctgacntctggttcacaattccccaattaaaactcacatcaatattgccaatacataacatttagttaaccattcattgtcattatccctacacaacacaattggcagtgccacttttacacaacgtgtgacaaggagatgagcaacagactcattacacgatgtgcgtggactccaggagacctgcaatgaatctctggcaacaaaactacgatcccgccgggaatatctggctttccagtttgatagcatcgcttcccatcctgtttttcttctttgcgctgattaagctcaaactgaaaggatacgtcgccgcctcatggacggtagcaatcgcccttgccgtggctttgctgttctataaaatgccggtcgctaacgcgctggcctcggtggtttatggcttcttctatggtttgtggcccatcgcgtggatcattattgcagcagtgttcgtctataagatctcggtgaaaaccgggcagtttgacatcattcgctcgtctattctttcgataacccctgaccagcgtctgcaaatgctgatcgtcggtttctgtttcggcgctttccttgaaggagccgcaggctttggcgcaccggtagcaattaccgccgcattgctggtcggcctgggttttaaaccgctgtacgccgccggactgtgcctgattgttaacaccgcgccagtggcatttggcgcgatgggcattccaatcctggttgccggacaagtaacaggcatcgacagctttgagattggccagatggtggggcggcagctaccgtttatgaccattatcgtgctgttctggatcatggcgattatggacggctggcgcggtatcaaggagacgtggcctgcggtcgtggttgcgggcggctcgtttgccatcgctcagtaccttagctctaacttcattgggccggagctgccggacattatctcttcgctggtatcactgctctgcctgacgctgttcctcaaacgctggcagccagtgcgcgtattccgttttggtgatttgggggcgtcacaggttgatatgacgctagcccacaccggttacactgcgggtcaggtgttacgtgcctggacaccgttcctgttcctgacagctaccgtaacactgtggagtatcccgccgtttaaagccctgttcgcatcgggtggcgcgctgtatgagtgggtgatcaacattccggtgccgtacctcgataaactggttgcccgtatgccgccagtggtcagcgaggctacagcctatgccgccgtgtttaagtttgactggttctctgccaccggcaccgccattctgtttgctgcactgctctcgattgtctggctgaagatgaaaccgtctgacgctatcagcaccttcggcagcacgctgaaagaactggctctacccatctactccatcggcatggtgctggcgttcgcctttatctcgaactattccggactgtcatcaacactggcactggcactggcgcacaccggtcatgcattcaccttcttctcgccgttcctcggctggctgggggtattcctgaccgggtcggatacctcatctaacgccctgttcgccgcgctgcaagccaccgcagcacaacaaattggcgtctctgatctgttgctggttgccgccaataccaccggtggcgtcaccggtaagatgatctccccgcaatctatcgctatcgcctgtgcggcggtaggcctggtgggcaaagagtctgatttgttccgctttactgtcaaacacagcctgatcttcacctgtatggtgggcgtgatcaccacgcttcaggcttatgtcttaacgtggatgattccttaatgattgttttacccagacgcctgtcagacgaggttgccgatcgtgtgcgggcgctgattgatgaaaaaaacctggaagcgggcatgaagttgcccgctgagcgccaactggcgatgcaactcggcgtatcacgtaattcactacgcgaggcgctggcaaaactggtgagcgaaggcgtgctgctcagtcgacgcggcggcgggacgtttattcgctggcgtcatgacacatggtcggagcaaaacatcgtccagccgctaaaaacgctgatggccgatgatccggattacagtttcgatattctggaagcccgctacgccattgaagccagcaccgcatggcatgcggcaatgcgcgccacacctggcgacaaagaaaagattcagctttgctttgaagcaacgctaagtgaagacccggatatcgcctcacaagcggacgttcgttttcatctggcgattgccgaagcctcacataacatcgtgctgctgcaaaccatgcgcggtttcttcgatgtcctgcaatcctcagtgaagcatagccgtcagcggatgtatctggtgccaccggttttttcacaactgaccgaacaacatcaggctgtcattgacgccatttttgctggtgatgccgacggggcgcgtaaagcaatgatggcgcaccttagttttgttcacaccaccatgaaacgattcgatgaagatcaggctcgccacgcacggattacccgcctgcccggtgagcataatgagcattcgagggagaaaaacgcatgattatttccgcagccagcgattatcgcgccgcagcgcaacgcattctgccgccgttcctgttccactatatggatggtggtgcatattctgaatacacgctgcgccgcaacgtggaagatttgtcagaagtggcactgcgccagcgtattctgaaaaacatgtctgacttaagcctggaaacgacgctgtttaatgagaaattgtcgatgccggtagcactggcaccggtgggtttgtgtggcatgtatgcgcgtcgtggcgaacttcaggcagccaaagcggcggacgcgcatggcattccgtttactctctcaacggtttccgtttgcccgattgaagaagtcgcgccagccatcaagcgcccaatgtggttccagctttatgtactgcgcgatcgcggctttatgcgtaacgcgctggagcgagcaaaagcagcgggttgttcgacgctggttttcaccgtggatatgccgacaccgggagcgcgttatcgtgatgcgcattctgggatgagcggcccaaatgcggcaatgcgnnnntacttgcaagcggtgacgcatccgcaatgggcgtgggatgtgggcctgaacggtcgtccgcatgatttaggtaatatttcggcttacctcggcaaaccgaccggactggaagattacatcggctggctggggaataacttcgatccgtccatctcatggaaagaccttgagtggatccgcgatttctgggatggcccgatggtgatcaaagggatcctcgatccggaagatgcgcgcgatgcagtacgttttggtgctgatgggattgtagtttctaaccacggtggccgccagctggacggtgtactctcttccgctcgtgcgttgcccgctattgcagatgcggtgaaaggtgatatcgccattctggcggatagcggaattcgtaacgggcttgatgtcgtgcgtatgattgcgctcggtgccgacaccgtactgctgggtcgtgctttcctgtatgcgctggcaacagcgggccaggcgggtgtagctaacctgctaaatctgatcgagaaagagatgaaagtggcaatgacgctgactggcgcgaaatcgatcagtgaaattacgcaagattcgctggtgcaggggctgggtaaagagttgcctacggcactggctccgatggcgaaagggaatgcggcatagtcgtttgagccccctcaccctaaccctntccctcagggagtggggaccgttcggcgctgtatgtactccctcactctgaaacgacaccgcactctttttttctccctcgcccctccggggtgaggggaaaaggccgcactgctcaccaattttctgctatcctgcccccgcactaagggggcagtatgctaaacatcgtactttacgaaccagaaattccgccaaatactggcaatatcatccgtctttgcgctaataccggctttcgtctgcatatcatcgaaccgatgggatttgcctgggacgataagcgcctgcgccgcgcggggctggactatcacgagtttaccgccgttacgcgtcatcatgactttcgcgcgttcctcgaagcagaaaatccccagcgcctgtttgccctcaccacgaaaggtacgcctgctcacagcgccgtaaactatcaggatggcgattatctgatgttcggcccggaaacacgcggcctgccagcgagcattcttgatgccctgcccgctgaacaaaaaattcgcattccgatggtgccggacagccgcagcatgaacctgtccaatgcggtgtcagttgtggtgtatgaagcctggcggcagctgggatatccgggagcgttgttgagagattagttactgtatgccggatagatgattacatcgcatccggcacgatcacaggacattagatcccatccccatactcaaatgtatggttaataccgttgaaatgctggtccatatccattgatggcttatcgctgtctggtttaccgacaatacgagccggaacgccagcggcggttgtatgcggcggcaccggttgcagcaccacggaacctgcgccaatcttcgcgccgcgaccaacttcaatattgccgaggattttcgcgcccgcgccaatcatcacaccttcacgaattttcgggtgacggtcaccaccagatttacccgtaccgccaagcgtcacagattgcagaatcgatacgtcgttttcaattaccgccgtttcacccacaacgatgcccgtggcgtggtcgagcataatgccacggccaatttttgctgccgggtgaatatcgacctggaacgtcacagaaacctggttttgcagaaagattgccaatgcgcgacgcccctgattccacaaccagtgaccgatgcgataggcctgcaaggcatgaaaacccttcaggtataacaacggggttgagtatttatcgactgccgggtcgcgggtacgcaccgcctgaatatcacaggccgcagaggcgatcatttccgggtcagcggcgtaggcttcttccaccacttcacggatagcaatagcaggcataattggcgatgacagcttgttcgccagcatgtagctcagtgcactaccaaggttttcgtgcttgagtagcgtcgcgtggtaaaaactggccagcattggctcacagtccgccagcgttctggcttcggctttnatattgttccagacaatttccagttcttcacacgacattgcttactccacacgatgagataatgaccggcccgttctgcgcgggccgggtcatagcggtaacaaaggttccctggggttagtggctgctgcgctcgtccttgcgtgcacgacctaataacgtcaatgctgcctcgcgcgcgttttttccgcaatataatacttgataaatttcctcggttattggcatttctacgccgaagcgatgcgccagttcgcggacttctttcgtattgcggtagccttccaccacctgaccaatcttctcctgcgcgctttgtacatccatgccctgaccgagcatcatgccaaaacggcggttacgcgactggttgtcggtacaagtaagcacaagatcgcccagccccgccatgcccataaaggtggcaggatcggcacccagcgccgcgccaagacgcgacatttcagccagcccacgggtgatcagtgccgtacgcgcattcgcaccaaaaccgataccgtcggacatccccgcgccaatggcaatgacgtttttcaccgcaccgccaagctgcacgccaatgaaatccggattgctgtaaacgcggaaacttttgccgcagtgcagcagctgctggagatcatcggcaaaggtctgatcggtcgaggccagcgaaatagctgtcggtaaacctgccgccagttctttcgcaaacgttgggccagagataaccgccagcggaatttgatcgcctaaggcctcacgcgccacgtcctgtaacagacgtccggtttccgcttccagccctttggtcgcccacaccagacgcgcatcaggacgcatcagcggtttaatctggcgcagcacttcaccaaagacatggctgggtacgacgacgagaatattacggctggctgccagcgcagtggcgagatcgctttcaagatggagcgtatcgggaaaaggcacatcggggagaaacgcggcgttacagcggtcgcgttcaagcgttgcgatatgttcagggtcatggccccagaggacaacctcgtggccatttcttgccagggtgatggcaagagcggtgccgtacgagccggcaccgatcacagtcattgaagcattacgttggttcatcaggcatcctgatgttcttcagtaccttcgccagcctgctgctgcaaatagttcatgaacagcgcatcgaagttaaccggcgcaaggttcagttgcgggaatgtaccgcgggataccatgctggtgatgcantcacgagcatacgggaacagaatgttcgggcagtatgcgcccaggcaatgtgccatctgggtgccttcgatacccgcgatggagaaaataccgccctgctgaacttcacacaggaacgcggtttcttcgcccagggaggccgttacggtaacacgcagtaccacttcgtatacgtcatctgccagttgggaagatgccgtatccagatcaagtttaacttctggttgccaatctttctggaaaacgtgcggcgcgttcggcgcttcgaaagagatatccttggtataaatacgttggatctggaaagtcatttcagtgttgttttgttctgacatgtgtagaaaacccttaagtgttgtccttaaatactgcgcaatgtaatgccaacgttcacacgttatttcagcaggggatccagtccaccacgtgcatccaatgcatacaagtcatcacagccgccaatgtgctgtgcgtcaataaaaatctggggaaccgtggtgcgaccgctgcgtttgatcatctcttcacgcttggcggcattgccatcgatcggcaactcctgaaaactcacgcccttgctgctcagcagtgcttttgcacgatggcaatacgggcaggtttctttggtatagatttcaacattggccataatttagctcctgtttttttaccctgaaatttcatgttgcagggcggctgcaaaatggagtgtccccagaagcttataacaataagtcgctgggggcctaattgcagctaacggcctgcatcatgaaagacgacaggtaaattatttgccgcgcaccaaaggcaagttttcgccagcccagccagcgacgccttctttcagcacgaatacttgcgcaaaaccagctttcgtcagtgcgtttgcaggctcctggcactgcatgccagaaccgtctaccacgataaccggtttgtctttgtgcttctcaagctcaccaacattgttggctttgatttcgctcggcaacagattgatagaacctgcgatatggcctttacggaagtcatcacgctgacgtaaatccacaaccacagcgtcttctttgttgatcagacgcgtagcttcaccacgagtaatcaccttcactttcgaggtcaggctcttaaacgtagtcacaagaaccgccaccagtaacgcgatccaggcgatactcagtatgggatgacggccaacaaattgcataatttcttgcatggggggtaacaactcccgacgtagtgattaaaaaaaccaggaaaggagtatacctgcgcggtgcggcaaatacagccagcgcgttaactggaatgcaattttgcggggcacgacgaaaaaaaagcgcaaatctggcatcggcttgccgcgagcggtcgtatattttgatcttcagaggctattttatcgattcagctgtagtaaaattacgcaaattttgactcttgagtatgaggttgtcgcaatgtcggtttctaaaaaacctatggtactggtgattctggatggctatggctatcgtgaagaacagcaggataacgccatttttagtgctaaaaccccggtaatggatgcactgtgggccaatcgtccgcataccctgatcgacgcttccggtctggaagtcggtctgcctgaccgtcagatgggtaactccgaagtaggccacgttaacctgggtgccggccgcatcgtgtatcaggacctgactcgtctggacgttgaaatcaaagatcgcgctttctttgctaatccagtgctgactggcgcggtagataaagcgaaaaacgcaggtaaagcagtacacattatgggtctgctctccgcaggcggcgtacacagccacgaagatcacatcatggcgatggtagaactggcagctgaacgcggcgcagaaaaaatctacctgcacgcattccttgacggtcgcgacaccccgccgcgcagtgctgaatcctcgctgaaaaaatttgaagagaaatttgctgcgctgggtaaaggccgcgtagcgtccatcattggtcgttactacgcgatggaccgcgataaccgttgggatcgcgttgaaaaagcctatgacctgctgactctggcgcagggtgagttccaggccgatactgccgttgctggtttgcaggcagcttatgctcgcgacgaaaacgacgagttcgtgaaagcgaccgttattcgtgcagaaggtcagccagatgcggcaatggaagacggcgatgcgctgattttcatgaacttccgtgctgaccgcgcgcgcgaaatcactcgtgcattcgtaaacgcagatttcgacggcttcgcgcgtaagaaagtggttaacgtcgatttcgtgatgctgaccgaatacgccgctgacatcaaaactgcggttgcttacccacccgcttccctggttaacaccttcggcgagtggatggcgaaaaacgacaaaactcagttgcgtatttccgaaaccgaaaaatatgcccacgttactttcttcttcaacggtggcgtagaagagtcgttcaaaggcgaagatcgcattctgatcaactcaccgaaagtggctacctacgatctgcaaccggaaatgagctccgcagagctgaccgaaaaactggttgcggccatcaagagcggcaaatacgacaccattatctgtaactatccgaacggcgacatggtaggtcacaccggggtgatggaagcggcggttaaagcggttgaagcactggatcactgcgtggaagaagtcgcgaaagcggttgagtccgtgggtggacaactgctgatcaccgctgaccacggtaacgctgaacagatgcgcgatccggcaacgggtcaggcacacacggcacacaccaacctgccagttccgctgatttacgttggtgataagaacgtgaaagcggttgcaggcggcaaactttctgacatcgcgccgaccatgttgtcgctgatgggtatggaaatcccgcaagagatgactggtaagccgctgttcatcgtggaataatccctccccatgaggggaaaggcgattaataccatgacacgggccgtgaaaccgcgcaggtttgcaatcaggcccatcatctacgccagcgttcttagcgctggcgtattgttgtgcgcctnttccgcccacgcggatgagcgtgaccaactcaaatctattcaggccgatatcgccgcaaaagagcgcgcggtacgccaaaagcaacaacaacgcgcaagcctgctcgcacaattgaaaaagcaggaagaagcgatctctgaagccacccgtaagctgcgcgaaacgcaaaacacgctcaatcaactcaataaacagattgatgagatgaacgcgtcgattgccaaactggagcagcaaaaagccgcccaggagcgcagcctcgccgcacaactggatgccgcattccgtcagggcgagcataccggtattcagctgattctcagcggtgaagaaagccagcgtggacagcgtttacaggcttatttcggctatctcaaccaggcgcgacaagaaaccattgcccagttgaagcaaacgcgtgaagaagtcgccatgcagcgtgctgaactggaagagaaacagagcgagcaacaaacgctgttatatgagcagcgcgcccaacaggcgaaactgactcaggcgctgaacgagcgtaaaaagacgctggcagggctggagtcttccatccagcaaggtcagcaacagttgagcgagctgcgcgccaacgaatcccgtctgcgtaacagcattgcccgtgcggaagccgcggcgaaagcgcgtgcagaacgagaagcacgtgaggcccaggcggttcgcgaccgccagaaagaagcgacgcgcaaaggcaccacctacaaaccgaccgaaagcgaaaaatcgctgatgtcccgaactggtggcctgggtgcgccgcgtggtcaggcattctggccggttcgcgggccgacgctgcatcgctatggtgaacagctacagggcgaactacgctggaaaggaatggttatcggtgcctctgaaggtactgaagttaaagcgattgccgacggtcgggtgattctggctgactggctgcaaggttacggtctggtggtggtggttgagcacggtaaaggcgacatgagtctttacggctataatcagagcgcactggtgagcgttggttcgcaggttcgcgcgggccagccaattgcactggtgggcagcagtggcggtcagggtcggccttcactctatttcgaaattcgccgccaaggtcaggcggtcaatccacagccgtggttgggaagataagttttgtttccatttcgtcgtaacgttcttgcatttgccgctctgttggcgctctcctcccccgtacttgctggcaaacttgccatcgtcattgatgattttgggtatcgcccgcacaacgaaaaccaggtgctggcgatgccctccgctatctccgtcgctgtattacccgattcaccgcacgccagagagatggcgaccaaagcgcataacagcgggcacgaagtgttgattcatctcccgatggcaccactgagtaaacagccgctggagaaaaatacgctgcgcccggagatgagcagcgacgaaattgagcgcattattcgtagtgcggtcaataacgtgccctatgccgtggggatcaacaaccacatgggtagcaagatgacctctaacctgtttggtatgcagaaagtgatgcaggcactggagcgttacaatctttacttcctcgacagcgtaaccatcggtaatacccaggcgatgcgcgccgcgcaaggtactggcgtgaaggtgatcaaacggaaggtgttcctcgacgattcgcagaacgaagcggacatccgtgtgcaatttaatcgcgcaattgatctggcgcgtcgcaacggttcaaccattgccattgggcatcctcacccttcaacggtacgcgtgctacaacagatggtttataacctgccgccagacattacgctggtgaaagccagcagcttgctgaatgaaccgcaggttgatacttctacaccgccgaaaaacgctgtgcctgatgcaccgcgtaatccgttccgtggcgtgaagctgtgcaaaccgaagaaaccgatagaacctgtttatgctaatcgcttctttgaagtattaagcgaaagcatcagccagagcacgctgatcgtttacttccagcatcagtggcaaggctggggcaaacagcccgaagcggcgaagtttaacgctagnnnnnnnnnnnggcgctacgcgtaatgcgatggtgcgaccgcgtttttttcgcgccattgccataagcggaaagaccacagtaacgcctggtaaccgaccttcacgctgcgcacattggtaatcaggcgcttatacataccggaagtaaatatctcggcaatcatccgttggcgggtaagaatatccggctctttgcgcaccgcatggcaaacacgcaatgcttcgtaagttatttgctgatgaaattccggataaatcataattttgtcggcataatttcgatttaatttctccagcaggcgggtaatcttaatatagtgacgttgataattaaggtttttattcccttgtctatgcaaccgactcactgacgtattatgcagataatatttatataatgattgctcggtatatcgcgcacgcagcgcgttaaacatgaattctgttgtccagacaatatcctgatgatgtaatccggcaataaannnnnnnnnatttttaacaataacatcacggcgataaacccccatccagacaacgtgagtccaacggcgcgaagaaagccccatccgcagccagtccgggccggttaatacaccggttgagcgaaggcgatcgctggggatggattgccaggtttctcccgtttcacgaaaagaccagtcagcgttgcactgcgccacgtcgaggtcgtcctctaacgccatggtcatcagcgtttcgtacatggtgggatagacctcatcgtcagcatcgacaaaagcgacatatttgcccgtcgccacctcgatcccacgattacgcgctaccgatgcgccagcattcgcctgatgcaacaaacgaacgtgcggatagttttctgcgtaatgctttgctatttcaacagaattatccgttgaaccatcgttaataataatgatttccagagcagtccaggtttgcgtaattaaagattccatacaagtgcggaaatcatcgcccgcattatataacggaataataacactaagtttattggtgctgttcatcataaattaccgacgacctctgaagttatcctgacgttttacaggctttgtattaagaaactattaagcctgtgagatattatttttacaggtgagagagtcacttcagggtagagagataatgagaacagctatataaaagatcagcgcaattacgaactctttattacactgacaggattttacatatttaacagattatcctcaggcaaaagggctggaataccagccctttttcgtgttaatcccagctcagaataactttcccggactggcccgaacacatagcgtcaaagcccttctggaaatcatcgatagagaaacgatgggtaatgatcggcgagagatcgaggccagactgaatcagcgccgccatcttgtaccaggtttcaaacatctcacgaccgtaaatgcctttaatgaacaagcctttaaagatcactttggtccagtcgatagacatgtcagacggtggaatacccagcatcgcaatacgaccgccgtggttcatggtatcgagcatggtacgaaacgctggcggcgcgccggacatttccagaccgacatcaaagccttcggtcatgcccagttcagccatcacatcattaaggttttctttcgcgacgttaaccgcacgggtgatacccattttgcgcgccagctcaaggcggtattcgttaacatcggtgatcaccacattgcgtgcaccaacgtgtttcgccaccgccgcagccataatacctatcggacctgcaccagaaaccagcacatcttcgcccaccagatcgaacgacagcgcggtatgcacggcgttaccgaagggatcaaaaatggaagccaggtcgtcggagatattgtcggggattttgaaagcgttgaacgccggaatcaccagatattcggcgaagcagcccggacggttaacaccgacaccaatggtgttgcggcacagatgggtacgaccgccacgacagttgcgacagtgaccgcaggtgatatggccttcgccagaaacgcgatcgccgattttgaagcctttcacttcctgaccaatacctaccacttcaccgacatattcatggcctacgaccatcggcaccgggatggttttttgcgaccactcatcccagttatagatgtgaacgtcagtcccgcagatggctgttttacggattttaatcagcagatcgttatgcccgagttccggtacaggaacgtcggtcatccagatgccctcttccgctttcagtttggataacgctttcatctcacatcctcaggcgataacgcccagttgtttaccaatacgcgtgaatgcttctactgcacgcgtaatttgctcaggggtatgcgccgcagacatctgggtacgaatacgcgcctgacctttcggaacgaccggatagaagaaaccggtgacgtaaatgccctctttttgcagctcacgggcaaatttctgcgccactactgcatcgccaagcatgaccggaataatggcatgatcggctcccgccagggtaaagcccgccgccgacatttgctcacggaactggcgcgcgttcgcccacagacggtcacgcagttcgctgcccgcttcgaccatctccagtactttgatggacgcggcaacaatggccggtgccagcgagttggagaacaggtacggacgagaacgctggcgcagccactcaaccacctctttgcnnnnnncggtataaccaccagaagccccgcccagcgctttaccaagcgtaccggtgataatatcgacccggcccatcacatcgcagtattcatgggaaccacgaccattttcaccgacaaaaccgaccgcgtgggagtcatccaccatcaccagggcatcgtatttatctgccagatcgcaaacgcctttcaggttggcaatcacgccgtccattgagaacacaccatcggtggcaatcagcacatgacgcgcaccggcttcacgcgcttctttcagacgtgcttccagctcctgcatatcgttgttggcatagcgatagcgtttagctttgcacagacgcacaccatcaataatagacgcgtggttcagtgcgtcggagataatggcgtcttccgcacccagcagcgtttcaaacagtccaccgttagcatcaaagcaggaagagtagagaatcgcatcttccatccccaggaatgccgccagtttttgttcaagctctttatggctgtcctgagtgccgcaaataaaacgcaccgaagccatgccgaaaccgtgagaatccattcccgcctttgctgccgcaatcagatccggatgattcgccagcccgagatagttgttggcacaaaagttaatgacgtggcttccatcagccacagtgatatctgcttgctgcgcagacgtaataatgcgctcttctttaaacaacccttccgcccgtgcggtttccagatcgttggttaactgctgataaaattctccacgcattgcgattctccagacagggcaaattccagcacatattacccaaacttataggtcgcgacgagatgacgcgttaactcttctgcaaaattcaggataaatgacgtgtaacttgatgtctctcaacacctacagatagtagaaaaactgtacagttttggctgggcataatgatgattgattttactgcattgatataaaaagaaaaaatgatgccaaagcatcatttttcctatctcagttggtatcaaaacgctacccactaatggagggaaacctattttcttgaaaggaaaattctcagcgcctgcatttttgcccctaaagtgttactcctgaagcagcgaaacaaatcgaaccattttcctctccccagatagtttaggttgaagagatcggggcgtttgtaatagcacatgacaaaaatgccctggtcatcatccacaatgttattatttagtgttattttttgactttccagaactaatttatagaattctttccatttatgctgtgaaccaacaattgcgcccccaataatatatacatgattgccaatcatgaaatcaaaaacctgttgttgagatgtgacagtaagccctttttttatagtgaaaagatgcatcttactttcatcaaatgggaaatcccaaattttcaatcctcgagttacatttggcttacggcaatagccaaaatctatccacgcaacaagaggcgttttcactaagcccatgttgatagctttatttacaaaataggccttaaggttacataccaaaacatactctggtgaccagtactctgggttttttaattgtcgaggctcaagtctatttgtaaacgactcatctttttgaattttttcgatacgacttctgatatatctaaatttcttttttatatcgataacgataaccgttgttggttttccgttgcgaatcgcttcaacccttggtttcaaatcgggagaagtgaaaataatcatctcattttcaagtgcggccagacgctcaaagtaactaaaataaacatcaactgaacgagctagtttttcacggaaccctttattagcagtccaatcccctctaccaatgtcaaaatatgcagtgataattgtggtggatgatttcattactaataagaccattaatatnnnnnnagaattatatcataaatattaacagaatgtatactgtatattatccattcaaatgcttccgttatttatcatacatcggaatattgatactaaagcactattcacatgcaaaaccaacatccgccatgaaggactagctaaaacccaaactagtttgttgcaattagcatccttgcacctctatgtaaagggctgaagggattcggatgtgatggtatgattacagacattcgtgtctgagattgtctctgactccataattcgaaggttacagttatgatcatcgttaccggcggcgcgggctttatcggcagcaacatcgttaaagccctgaatgataaaggcatcaccgatattctggtggtggacaacctgaaagacggcaccaagtttgtgaacctggtggatctgaatatcgcagactatatggataaggaagacttcctgatccagattatggctggcgaagagttcggcgatgtcgaagcgattttccacgaaggcgcgtgctcttccaccaccgagtgggacggcaagtatatgatggataacaactatcaatactccaaggagctgctgcactactgcctggagcgtgaaatcccgttcctgtacgcttcttccgcagccacctacggcggacgcacctccgactttattgaatcccgcgagtacgaaaaaccgttgaacgtctacggttactcaaaattcctgtttgatgaatatgttcgccaaatcctgccggaagcgaactcgcagattgttggcttccgctatttcaacgtttatggaccgcgtgaaggccataaaggcagcatggcgagcgtcgctttccatctcaacacccagcttaataacggtgaatcaccgaagctgttcgaaggtagcgagaactttaaacgcgacttcgtctatgttggcgatgtggcagatgtaaacctgtggttcctggaaaatggcgtttccggcatcttcaacctcggcaccggtcgtgcggaatccttccaggctgtagctgatgctacgctggcttatcacaagaaaggccagatcgaatacattccgttcccggataagctgaaaggccgctaccaggcgttcactcaggcagatctgacaaatctgcgcgcggcgggttacgacaaaccgttcaaaaccgttgctgaaggtgtaacggaatacatggcctggctgaatcgcgacgcataagagctctgcatgaaaatactggtgatcggcccgtcttgggttggcgacatgatgatgtcgcaaagtctctatcgcacgctccaggcgcgctatccccaggcgataatcgatgtgatggcaccggcatggtgccgtccattattatcgcggatgccggaagttaacgaagctattcctatgcctctcggtcacggagcgctggaaatcggcgaacgccgcaaactgggtcatagtctgcgtgaaaagcgctacgaccgcgcctacgtcttacctaactccttcaaatccgcattagtgcctttcttcgcgggtattcctcatcgcaccggctggcgcggcgagatgcgctacggtttactcaacgatgtacgcgtgctcgataaagaagcctggccgctaatggtggaacgctatgtcgcgctggcctatgacaaaggcattatgcgcacagcacaagatctgccgcagccattgttatggccgcagttgcaggtgagcgaaggtgaaaaatcatatacctgtaatcaattttcgctttcatcagaacgtccgatgattggtttttgcccgggtgcggagtttggtccggcaaaacgctggccacactaccactatgcggagctggcaaagcagctgattgatgaaggttatcaggtggttctgtttggctctgcgaaagatcatgaagcaggcaatgagattcttgccgctttgaataccgagcagcaggcatggtgtcggaacctggcgggggaaacacagcttgatcaagcggttatcctgattgcagcctgtaaagccattgtcactaacgattctggcctgatgcacgttgcggcggcgctcaatcgtccgctggttgccctgtatggtccgagtagcccggacttcacaccgccgctatcccataaagcgcgcgtgatccgcctgattaccggctatcacaaagtgcgtaaaggtgacgctgcggagggttatcaccagagcttgatcgacattactccccagcgcgtactgaaagaactcaacgcgctattgttacaagaggaagcctgacggatgcgggttttgatcgttaaaacatcgtcgatgggcgatgttctccatacgttgcccgcactcactgatgcccagcaggcaatcccagaaattaagtttgactgggtggtggaagaagggttcgcacagattccttcctggcacgctgccgttgagcgagttattcctgtggcaatacgtcgctggcgtaaagcctggttctcggccccnnnnaaagctgaacgcaaagcgtttcgtgaagcgctacaagcagagaactatgacgcagttatcgacgctcaggggctggtaaaaagcgcggcgctggtgacgcgtctggcacatggcgtaaagcatggcatggactggcaaaccgctcgcgaacctttagccagcctgttttacaatcgtaagcatcatattgcaaaacagcagcacgccgtagaacgcacccgcgaactgtttgccaaaagtttgggctatagcaaaccgcaaacccagggcgattatgctatcgcacagcattttctgacgaacctgcctacagatgctggcgaatatgccgtatttcttcatgcgacgacccgtgatgataaacactggccggaagaacactggcgagaattgattggtttactggctgattcaggaatacggattaaacttccgtggggcgcgccgcatgaggaagaacgggcgaaacgactggcggaaggatttgcttatgttgaagtattgccgaagatgagtctggaaggcgttgcccgcgtgctggccggggctaaatttgtagtgtcggtggatacggggttaagccatttaacggcggcactggatagacccaatatcacggtttatggaccaaccgatccgggattaattggtgggtatgggaagaatcaagtagagtgtcgttctacaagtatgtctcttgcagatttgccagctcaaaccgtttttcaaaannnnaatcttgaaataataaccaataagttgacatcggagataagatgacctcaacattatttttctctctcgagaaaaaaaactggatagcgtactggaacagagctctcgtattcttattcattaccacctattttttgggtgggattacaaggtataaacatcttattgttattcttatgacaataacgacaatcgtctatctctgcaaacggccaaaacactatctctcactatttaaaacatttctttttggtagtgttgccatattaactattgctgcattgctgtcacttcttcaatcccctgatgcaggtgctagcatgaaggaaattttcaaagctattattgagaatactttactatgcacaatagcaataccgatcatattgagagacgagaaaagagaagatgtcgaaaaaatcgttttcttctcatttattagtgcgttgggcttacgctgtttttctgaattgattacctattataaggactatcaacaagggataatgccattcgcagattatagacaccgtagcatttctgactcgatggtctttttattccctgcattgttaaatctctggcttatcaaatcagcaaaataccgcatttcttttgtggttctaagcgttatttttatttttctgatattaggaactttatccagaggggcctggctttccgtgttagtcattggattaatatggattctgatgtttaaacaatggaagttactattagtaggagtaatggttgccatcattgcattgtcggttattttcacacataaggagatgaccgcaaagctaacgtataaacttcaacaaactaatagttcttatcgctatgcaaatggtactcaaggcagcgcactcgatctaatattagaaaatcctgttattggttatggttacggtaacgttgcatataaagatgtctataataaacgtgtcattgattatccagaatggacctttagacaatcaatagggccacataattttgcgctattcatctggtttggcactggtttattagggctggtaagtcttatgatgctatactgtgcaatattgaaagagtgtataaaaaatggcgtcaagaataaatatcgctcaccatataatgcatattatataatcttactatcttttataggttattttgttatccgtggaaacgtagaacaaattgaaccaaatttattaggcgtttacgccggcttattattagcgatgaaaaacaagtaaaaaataaaaaaggctgcataatgcggcctttttatttattcaaaccaattatgaataacctcttcgaatctttgagttacgccatcccaactgtagtgatcaaacacaaagtcctgaccttgctttgcaactgctgttaattcaggattcgctaacgtttttaaaatatcgctgcttatggagtctgcagtcataggttcttttaaatggaatcccgtagtattttctttgacaaattccgtcatccccccacgcgtactcactaaaacaggcttaccagcacccatagcttcaattgccaccatgcaaaatggttcctggaactgggaaggaatgacgactaaatctgccagtgggtaataacaatgcatcttttcaggcggtatgcttcctaacataatgcaacgatccttcaaacgttttgcaatttccctgacattgcgttgatatgcacctttgtcacttttactcatttctgtataatcaccaatcacaactaattttaaatttttgtgagcagcggccaatttttcgaatgattgcatcaacagcaatatgcctttgtcagggacgatacgcccannataaaaaataattttctcttcaggggagatattaagttcgcttctagtgatcggctgaaaattagattgataggtttctaaatcaattccatttggtacaatctcaatatctgcatttgctaaataagattggtaatactttttcaagtataaactaggcactatcattttaacattttgctcaagcaattttggttcaaatgcattatgcatatgtataaccactcttgcctgaggagctcgcttacgaatttgagtgtatagcttcatgctattatgaactacaataacactttctttcgttataggaaaatcatgtgcaatattcaatattctctgtgaatatggaagaggatcaagtcttgtccatttttgaaataaccgcttatatatgcgactgaatccaaccctatgaatactacaattatcattaacaaaggtgtaatttgagtatcctggatttttgatacaaacaatacgatttggaaaattggtacgctgagcaacctgatacatccacgtttcaacagcagccgctccgcgaggaggaattgaaaaaataggagtaaccgtaaatattattttatcaaccatctcgtatattaacctttcataacattatatttaattgctgtaaaaacaccatcgagaaattttttctggtaaagcaagtgtttatatttttctttgtactcatgttttttaacagcttttttataaggtatatttctccatggtgatatattataaatattacgaaaataatctgcagaggcgtagttcgcccaatcatgccatggcttagttataccagtataatgtatgaagacagtgtcatcattaataaaccgggtgtaatattcactatttttttcttcaaattctgactttatagtataaatacaattatattttctcggtaatattttagcatgatgtagaaacattaagtttaaaatatcttgatccgggtactttaatttttttataattgactcatctgataatagatcaaagaatttttccgttagtctttgttttaaccattcccgtaaattaatatacattacaccagagttaaaatagctaccgttaaaatcctcattacacaaacgctcagcgcttttactttgcatagcatctacatcaattaccactgccccatattcatctttaaactctaatgctattaactcgttcaatgaacccttacagacgatatcagcatcaagatataataatgaatccaatcgcgcagaanaataatcaaatgaaagcaaacgataataaatagatactggccagatatttgattgaggtagcgccttcaatggctcagaatcaatatgatataatttaattactgtttgatacttcgttgctaattgtgataataattcaatatactctttgtctaagtaatcagcgattatgtgaaaggtaaatttgttttgtttattattttcaagaattgaagcaattgaaatcgcagccccaacctggtagttctcatcaataccccatgagacattaaacgtttcccgttcatcaagtttaacggggcgcttgtccagttcaattatatctttaaattgagtaagatgtttaaaatccaatttaattacccttcatcataatcattatttgctcttcaatcctagtttgacttttacatccctgattacttttttaattttctttttgaatataagatatgtatagccaaagtctttcaattcattttttatattatagtgccgttcaagatcaatgcgatcttttgcttttaaaacagcggttgtttttttacctgaaaggtcaattagtcttaaacctttttcggatactataaaatttcctttatgaggatcgccagacaccattccatgctgatgcaactcttttatcgattctgataattgatccttcagatcttcagaaatttccaaatactcatttaacccgacaccttcaatatactcaatgagcataatataataatgagcgaaatttaatgttttacgttcagctagcaaaaaatagtcattaattgattggatgccttcaccacgtacccgatcggtttgataaattaaattttcataataatctttttttatgcaagattttaagaaacgttcggtcattttatgctttggcgcataaactttaagtacaagaggtccacgagcagtgtcaataagaatgactttagtatcatcaatagaacgaaaaacttttaatgttttaaccctgcaagttaaaaagtcatttagaacttgctcataaaagggatcattatcttttatgaaaactttcaacccatttatcgttttattatatatcataatgaattattttaaccttaaatctttagaagcatttttctttataatactttaaataattaaaaatgcctgccatataatgcttttgtttaaatttatgttttgcacaataccgatactgattgctatttacaggtttaagtaaatcttctttactccacggagaagctgctttggcgatcaaaaaactacgtgacaccggatagtcagcccactcatgccaaggttttgtaggtcccacatagtgtataaacacggtgtcatcattgactggattatcaactttgtcttttaattcatagttaatactatatcgggtattatatttctccgaaataaacttcactttaccattcaataatacattcagtacatcttgatcaaggtgggtgattttacttacccaatctgggtcacgcaacatttcaatagcttttgacgaaatgttatttagattccactcatcaatatttatcagtaaaaaaccagcattgaaatatccagaagctaactgtggtgtagttaataccgaggctcgattttgccaccattcaacatctctttcagctacaactgcggcaatttcattagtagaaaattgataatctaagagttctttaatactacccttgcaagcaatatctgcatcaagatatagtattttttcatgtttatgatagaaataatctgcaattataaatcgaaaatatgttgcgtaagtccagtttttcgtgcttggtaatgacttcagcttatcacaattgataacataaatattaattcttgaattatattgttttgctaaatcagaaaaatataatttgtctttatcactgatataatctgtgaaaacatgaaattcacaagagatttctctattgtttaatagaatagatgcgatggctacaccacatccaaaaagaaaatttctgtcaataccaaatgctatatcaagagtatttttagatcttatattttgataatgaaaattatactcaaaaaggatgatgtcactatcattgagttgagacatatttattctgtatccannnnnnnnnnnaaaataagttacgggttacaacgattttcgaatcgttctttccctgatttttgtggcttttgcttctgcttgcgacagcagtccttgttcctgcttgagaatgtctttaagcggggcggcaaaatacactttcataaaccgccagatatcccgctgagtcaggccgatattcatcgaagaaaaataaagcccaataagatctttatcccgccaacgacgtggaacgcgcgtgcgaagctgcgcccggtgcaggtcaattaccgaaatttttaactcctcttccttaccggaaaaaggcaagtgcagcaggaaatgacagatataacagtcacggtggttaatgcccgcagcatgcatatcgtgcaccatcgtcgcgacacgcttaataagcatacgctttacgcgaacatctggagggttagtcgcccagtcagcacagtaatcttcaagacttatggttggtgtcagatcttcggtaataataaatgaagttctggtcagcggattcatgcctttttcgccaaatgccaccccatacatagtatcaacgccgacatcccgcagtcgatgaatcgcattccattcgcggtctgcgcctaatactggcatccgcaatgagagtaaatttttgattatctctttcagggtcgtgccgcgatgccatttgagaaaatagcttttgcccgccatttcaaatcgcagagtgcggcgagtttccagttcacgaaaaacctcaccctgcaaggttttaacttcctcaaaaggatctttaccgcgccataacgtggcaaacggctctttaagttcaaccatccagaccacccgttatgatatccgccgctttctctggcagactgtataaatcttgtgtatcagcataatgtcgcgcattttccgcccaggcctggcgcaatgaagattgcgttaacgctttgcgtaaaatctcattcaatgtttcctggcggaatggctcagcaatagcctcgccgcaattggcgtcgacaatataatgcgcatagccacaaacggctgttgttagtaccggtaatcctgcagtaatcgcttccagtagcacaattcccgctgcttcctggtaggcaggatgcagtaataaatccgccgccgccattaattccgagacatcgttgcgccccgagaagaagtgaacattactgcgcacgccgcgtttttctgccagcgcctcaaattttcgcggtttatcctgtccaacaacatatagcaatgtgttgtggcgcagcgaatccggtaacgaagcaagtgcttcaatggaacgatcgacacctttacgcgtgaagtctgaaccgacctgcaacaataaatattgttgttcggttattccattcttcttacggaagatttcacggctattagctggctgctggctatatttacgatcaggataaatccccggtggtagaatatgaaaacgctccgcttcagtctgataatgtttctggaaatcggcgatttgcttatctgtcagcatcagcagctgtgtcggcttgccctgttcgaaggttgcccgctcaaaggcggcataatggcgataacgtgacgtcaggtgatagaaaaagcctttttcctgcgcgactttctcggcataacaaacatcagcggcataataaacgtccagccccggcattttgttgaatccaacgactttatcgacgggatgttcgcgtaaatgtttttgcacccaggcaaaatactccgcattgcgcccgtgattggtatgcgatttaaccggcactttgatcagttcaaatacatcagggcattcgccttcccacgactgggtataaacccgaacatgatgacctcgggcggcgactgtctgagcaatacgcataaaatcgcgctgcaaaccgccaaagggaaaatatttatataaacaaaaagcaacgatcataacgacgtacctgtcgtggaggagggcagtaatttatcgacagcagcaatgacatctgccgccggaataaccgaaagatacatctcatttcggtcacgctgatcgcgcgttggcatttcccggtaatctcccgcccagaattgaatcatgttatttgaccaaggacgccagaaaatatggtctgtcgcaccaaacagcgatatcagcggcgtattaactgcagcggcaatatgcgccggtgcggaatcaacgccaataaacagctgcgcatgatcgattaacgcaccaagttccgggaaggtcacctttccagccagcgccgttactggtggcgtctggcatccttgcgcaatttcattgacgcaggccagatcgtctttatctgggccggacgtcagaacgacttcataaccacgagcatgtaaggcatcaatcacagcggaaaacttggcgttgtcccagcatttgaagatttgccgcgccgtaggttggataaccacataattttgtccaacaccagcgtgatcaagttcgcgacgcatacgtttccagcttgcaggcgggtaactcatggttgtctgcttcaccaacgaatcaagtcccaatggtgtcagcacggataagttactttccaccacatttccaccctgcaacggcaccaaatgggtgaaacttttacgccaaaaagcagactgccgatgatgataatcctgggaaattttcacacgggcatttaataagcgaaccagtatagcaaccatccattgatcggtaagattgacgataaggtcatacttattggcacgtaataccttgatgagatgaaaaaagttggcaattttttctgaggcttttgcttttttattttttatgccgtagagcgcgttaatctctggattttcagacaggatcgggatggtgtcctgataaagcagcacatcgatttttgcgtcagggtaattttttttcagcgaactaatgacgggagtagttaataacatatccccatgaaaacgcatcttaatgagcaaaattcttcgaaatggcttatccacaagtaactctttttgttgagattatccgattaaggtgaagcagaaaaagcacgctaccgccccaggctcaacagctacctgaatactgataccgcactgatattgacgcgctagtgtatcacttctttcgcggcaatccgacccgaatgatttttaagcacattgttgattttcaataaagaaatcaatcaaataaaatcattagcaaccatattctttcactgttgctctgcgattccttcctgcacgtacagcagaaatcaatgaatcgcataaaaatacaaaaaaagtatagatgttcagcaagaattggcgggtaaattgctatttaagtcaaaaacgggaaaagtaatggtaaagccacagctaaatacatagaatccccagcacatccataagtcagctatttactatgctcgaattgctttacaccgcccttctctaccttattcagccgctgatctggatacggctctgggtgcgcggacgtaaggctccggcctatcgaaaacgctggggtgaacgttacggtttttaccgccatccgctaaaaccaggcggcattatgctgcactccgtctccgtcggtgaaactctggcggcgatcccgttggtgcncgcgctgcgtcatcgttatcctgatttacctattaccgtaacaaccatgacgccaaccggttcggagcgcgtacaatcggctttcgggaaggatgttcagcacgtttatctgccgtatgatctgcccgatgcactcaaccgtttcctgaataaagtcgaccctaaactggtgttgattatggaaaccgaactatggcctaacctgattgcggcgctacataaacgtaaaattccgctggtgatcgctaacgcgcgactctctgcccgctcggccgcaggttatgccaaactgggtaaattcgtccgtcgcttgctgcgtcgtattacgctgattgccgcccaaaatgaagaagatggtgcacgttttgtggcgctgggngcgaaaaataaccaggtaaccgttaccggtagcctgaaattcgatatttctgtaacgccgcagttggctgctaaagccgtgacgctgcgccgccagtgggcaccacaccgcccggtatggattgccaccagcactcacgaaggtgaagagagcgtggtcattgccgcacatcaggctttattacagcaattcccgaatttattgctcatcctggtaccccgtcatccagaacgcttcccggatgcgattaaccttgtccgccaggctggactaagctatatcacacgctcttcangggaagtcccctccaccagcacgcaggttgtggttggcgatacgatgggcgagttgatgttactgtacggcattgccgatctcgcctttgttggcggttcactggttgaacgtggtgggcataatccgctggaagctgccgcacacgcaattccggtattgatggggccgcatacttttaactttaaagacatttgcgcgcggctggagcaggcaagcgggctgattaccgttaccgatgccactacgcttgcaaaagaggtttcctctttactcaccgacgccgattaccgtagtttctatggccgtcatgccgttgaagtactgtatcaaaaccagggcgcgctacagcgtctgcttcaactgctggaaccttacctgccaccgaaaacgcattgaggttgttatgcaaaaacgggcgatttatccgggtactttcgatcccattaccaatggtcatatcgatatcgtgacgcgcgccacgcagatgttcgatcacgttattctggcgattgccgccagccccagtaaaaaaccgatgtttaccctggaagagcgtgtggcactggcacagcaggcaaccgcgcatctggggaacgtggaagtggtcgggtttagtgatttgatggcgaacttcgcccgtaatcaacacgctacggtgctgattcgtggcctgcgtgcggtggcagattttgaatatgaaatgcagctggcgcatatgaatcgccacttaatgccggaactggaaagtgtgtttctgatgccgtcgaaagagtggtcgtttatctcttcatcgttggtgaaagaggtggcgcgccatcagggcgatgtcacccatttcctgccggagaatgtccatcaggcgctgatggcgaagttagcgtagcgtttatgccggatggtatgccatccggcgcgcatgaattacttctggcactgccgacaataaaacgttgcccgctgcgcatgtttagtcgccacaatcggcgtaccgcacacccgacacggctcaccttttcgcccgtaaacctgcaattcctgagcgaaatagcccggtttaccatcactttgcagaaaatctttcagcgttgtaccaccctgntcaatcgaacgcagcaacaccgctttaatcacccgagctaacaattcacactctgccagcgacagtgatgacgccagccgatccggatggatccccgccgcaaacagtgattcgctggcatagatattccctacccctaccaccagcttgttatccatcagccacggtttaatcgccgtttttttcttcgcgcacttctgatgcagatactcaccattgaaatcgtcgctaagcggctccggtccaagatgggccagcacattatgcccttccagctctttggtccacagccaggcaccaaagcggcgcggatcggtgtagcgcagcactttgccgttgctcatcaccaaatccacatggtcatgcttttcagggggaagttcttctggaaggatgcgcaggctgccagacatccctaaatgaatgataatccagccctcaggcagctccagcagcagatatttagcccgccgctgcacgctaagcactggttggtcgcttaaacggtagatctcttctgaaaccggccagcgcaagcgtccgttgcgcaccactgcatgaagaatggttgcaccaacgagatgcggttctatgccgcggcggctggtttcaacttcgggtaattcaggcatagcatctccaggaatgaacagatgcagtcaatatgggggcaagcagataacaaaaaaccccgccggagcgaggttttttgttacatcaaagcgagaattatttgattttcgcttctttgtagatcacgtgctggcgaacaactggatcgaattttttcagttccagtttttccggcttagtacgtttgttcttcgtagtggtatagaagtgaccagtaccagcagaagaaaccagcttgattttctcacgaatacctttagccatgatttatttcctctaagtacttagtacttttcgccacgggcacgcagttcagccagaactgtatcgatgccttttttatcgattacacgcatacctttagcagatacgcgcagggtgacaaaacgcttctcgctctcaacccagaaacggtgagagtgcaggttcggcaggaaacggcgtttagtcgcgttcagtgcgtgggaacggttgttaccggtcaccggacgcttgccagtaacttggcagactcgggacatgtctattctccaaaaatcaaattagctcgagcttcgtatggggtattggcgcctcgtcaggctttacagcccggtcatcgcagttctatgtgaactctcgattgccaggcccaaatgccaaacccgagattctcaaaggtggcgnagtatacgctgactcagcgatgtgctcaagtcccgnacagacaaagatcccgaaggatcgcgcatagcgggttaaatccagccgcgttcggcaaaagaaacatactctccacgcccaatcacgatatggtcgagcacgcgtaaatccatgaactgacaactctttattatccgttcagtaatgagtttatccgctttactgggttcancacaacccgaagggtgattatgtgcaaggatcagcgccgaggcgtttatttttatcgcttcgcggataatttcccgaggatggacttcaacatggtttagcgtgccggaaaaaagacggctatgcgttataacccggtgttgggagtcgagaaagatcaccataaagatctcccgctcctcacccgtgagctggctttgtaaaaattcccgcgtcatctccgggctgagtaaagggctttcttcacgcatccgcacgttgtagtaacgtcgcgccagttcagcaatcccctttaactgggcaaatttcgctacgccaattccatgaacaccactaaattgttcatattcagaggttaacaagccataaagagagccgaaattctccagcatctcttttgccagggttaatacatctttaccgcgcgttccggtacgcagaaatagcgccagcagctcgacatccgttaaggcgctaataccaaacttcagcattttttcgcgcggcatcaacagctgtgcattgtttttcaccttcacctcctttgtggtgctcgcatcctgtcatagccgttccgttaaatcgacggccagttttcaatcctggaaagcgcctcgcaaagcgaatctcaggtgaaggcacgacaacaaaagtattgtgataaaatcgccaacttctggtgtcacccaacaggaaaaatcatcatgagcctggccggtaaaaaaatcgttctcggcgttagcggcggtattgctgcctataaaacccctgaactggtgcgtcgtttgcgcgatcgcggggccgacgtccgcgtagccatgaccgaagcggcaaaagcctttatcaccccacttagcttgcaggcggtttctggttatcccgtttccgacagtttgctggacccggcagccgaagccgctatgggccatattgagctgggtaaatgggctgatttagtgattctcgcccctgccacggcagatttgattgcccgtgttgctgccggaatggcgaatgacctggtatcgacgatttgtctggctacacctgcgcctgtagccgtgctccccgccatgaaccagcagatgtaccgtgccgctgccacgcagcataatttagaggtgcttgcttcccgtggtttgctcatctgggggccagacagtggcagtcaggcttgtggtgatatcggtcctgggcgaatgctcgatccgttaaccattgtggatatggcggtagcgcatttttcgcccgtcaacgacctgaaacatctgaacattatgattaccgccggcccgacgcgtgaaccgctcgatcccgtgcgttatatctctaatcacagctccggcaagatgggttttgctatcgccgccgccgctgcncgtcgtggcrcgaacgtcacgctggtatcaggtccggtttcactaccgacgccaccgtttgttaaacgtgttgatgtgatgaccgcgctggaaatggaagccgccgtgaatgcttctgtacannnnnnnnnnntttttatcggctgcgccgccgtggcggattatcgcgcagctaccgtggccccagagaaaatcaaaaagcaggccacgcagggtgatgaattaacaataaaaatggttaaaaaccccgatatcgtcgcaggcgttgccgcactaaaagaccatcgaccctacgtcgttggatttgccgccgaaacaaataatgtggaagaatacgcccggcaaaaacgtatccgtaaaaaccttgatctgatctgcgcgaacgatgtttcccagccaactcaaggatttaacagcgacaacaacgcattacaccttttctggcaggacggagataaagtcttaccgcttgagcgcaaagagctccttggccaattattactcgacgagatcgtgacccgttatgatgaaaaaaatcgacgttaagattctggacccgcgcgttgggaaggaatttccgctcccgacttatgccacctctggctctgccggacttgacctgcgtgcctgtctcgacgacgccgtagaactggctccgggtgacactacgctggttccgaccgggctggcgattcatattgccgatccttcactggcggcaatgatgctgccgcgctccggattgggacataagcacggtatcgtgcttggtaacctggtaggattgatcgattccgactatcagggccagttgatgatttccgtgtggaaccgtggtcaggacagcttcaccattcaacctggcgaacgtatcgcccagatgatttttgttccggtagtacaggctgaatttaatctggtggaagatttcgacgccaccgaccgcggtgaaggcggctttggtcactctggtcgtcagtaacacatacgcatccgaataacgtcataacatagccgtaaacatttcgtttgcggtcatagcgtgggtgccgcctggcaagtgcttattttcaggggtattttgtaacatggcagaaaaacaaactgcgaaaaggaaccgtcgcgaggaaatacttcagtctctggcgctgatgctggaatccagcgatggaagccaacgtatcacgacggcaaaactggccgcntctgtcggcgtttccgaagcggcactgtatcgccacttccccagtaagacccgcatgttcgatagcctgattgagtttatcgaagatagcctgattactcgcatcaatctgattctgaaagatgagaaagacaccacagcgcgcctgcgtctgattgtgttgctgcttctcggttttggtgagcgtaatcctggcctgacccgcatcctcactggtcatgcgctaatgtttgaacaggatcgcctgcaagggcgcatcaaccagctgttcgagcgtattgaagcgcagctgcgtcaggtattgcgtgaaaagagaatgcgtgagggtgaaggttacaccaccgatgaaaccctgctggcaagccagatcctggccttctgtgaaggtatgctgtcacgttttgtccgcagcgaatttaaataccgcccgacggatgattttgacgcccgctggccgctaattgcggcacagttgcagtaatatgacgccggatgacttttcatccggcgagtttctttaaacgccaaactcttcgcgataggccttaaccgccgccagatgttccgccatttccggcttctcttccaggtaagcaatcaggtctttcagggtgatgatagagatcactttgcagttgtaatcacgctcaacttcctgaatcgccgaaatctcgccgcgcccccgttcctgacgatcaagcgaaatcaacacgccagcaagcgtcgcgccattagcctgaataatctccatcgattcgcgnnnnnccgttccggcggtgatcacatcatctaccagcattacgcgtccttgtaacgcgctaccaaccagattgccgccttcaccgtggtcttttgcctctttgcggttaaagcagtacggcaggtcaaggtcatgatgctccgccagcgccacggcggtagtggtggcaatcgggatccctttgtaagcagggccaaacagcagatcgaactcaaggccggaatccaccaacgcttcagcgtaaaaacggcctaacagtgccagatcgcgcccggtattaaacagcccggcgttgaagaaataggggcttttgcgcccggacttcaacgtaaactcgccaaactttaacacctgcttgccaagcgcaaattcaataaactggcgctgatatggtttcatgccttcgctcctcatcttacttttctacagacaaaaaaaaggcgactcatcagtcgccttaaaaatcagtttgccagcgccgccttctgcgtcgctacaatggattcgattccccctcgggccagagccaacaaggtgagtagctcttcatgggtgaacggctcgccttctgccgtcccctgcacttcaatgatgcgcccgtcttcggtcatcactacgttcatgtcggtctctgcggcagagtcttcaacgtattccagatcgcaaaccgcttcgccgttcacaattccgacagaaactgcggctaccatccctttcatcgggttggttttcagcttgccgttttccaccagcttctgtagcgcatctgccagcgccacgcaggcacccgtaatcgacgcggtacgcgtgccaccatcagcctgaagcacgtcgcagtccagcgtaatggtgaactcacccagcgctttcaaatctactgccgcgcgaagagcacgggcgatcagacgctggatttccattgtgcgtccaccctgcttacctttcgccgcttcacgagcgttacgggtgtgggtagaacgtggcagcatgccgtactctgcggtgatccagccctggccctgacctttcaggaagcgcggcacgccttcttcaatagaggcggtacacaacactttggtatcgccaaattcgaccagcaccgagccttctgcatgttttgtatagttacgagtcagggtaacgggacgcacctgattattgctacggcctgctggacgcatattgaaatctccggcttgaaacaaatgtggctgcgcattatacggacttccggcggttattcctatcctgacaaggcatcgatggctataatccttccacctctccttttataaacaggaacgtctatgatccgcagtatgaccgcctacgcccggcgtgaaatcaagggcgaatgggggagcgcaacctgggaaatgcgctcggtaaaccagcgttatctggaaacttactttcgtctgccggagcagttccgtagccttgaacctgtcgttcgcgagcgtattcgttctcgcctgacgcgcggtaaagtggaatgtaccctgcgctatgagccagatgttagcgcgcaaggtgagctgatcctcaacgaaaaactggctaaacagctggtaactgccgcgaactgggtaaaaatgcagagtgacgaaggggaaatcaacccggttgatattctacgctggccgggcgtgatggcagcccaggagcaggatcttgacgccattgccgctgaaattctcgcggcgctggatggtacgctggacgactttattgtcgnnngcgaaaccgaaggtcaggcactgaaagcattgatcgagcagcgtctggaaggcgtcaccgccgaagtggtcaaagtccgcgcccatatgccggaaatcctgcaatggcagcgtgagcgtctggtcgcgaagctggaagatgctcaggttcagttggaaaacaaccgtctggagcaggagctggttctgctggcacaacgaattgacgttgccgaagaactggaccgcctggaagcgcatgtcaaagagacctacaacattctgaagaaaaaagaagccgttggtcgtcgtctggactttatgatgcaggaattcaaccgcgagtcgaacactcttgcgtcgaagtctatcaatgccgaagtgacaaactccgcgattgagctgaaagtgttgattgagcagatgcgcgagcagattcagaacattgaataactcgtaacgccaattcttacttttcagccttcacaaatgccgcccactcaaacagagcggcatttttcttccccgcaacttcaattctgttttgcgtgcctgctccagattttgtgatgtttttttgcccagcacactgagaacgtgagacactcacaactgtatataaatacagttacagatttactttctttgcaatcgatatcacatggagtgggcaatgaacgaacatcatcaaccttttgaagaaatacggcattatggcactgaagggcaagaattttggtcagctagagaattggcaccgttactggattatcgggactggcgcaattttcaaaaggtactggcccgcgcgactcaagcgtgcgaagccagcaatcaagctgcatctgaccatttcgttgaaaccaccaaaatggttgtattaggttcaggggctcaacgagaacttgaagatgttcatctctcccgctatgcctgttacctggtagtacaaaacggcgaccctgcgaaaccggtcattgcggcagggcagacttattttgctatccagacccgacggcaggagcttgctgacgatgaagcatttaagcaacttcgtgaagacgaaaagcgtctgtttctgagaaatgagttgaaagaacataacaaacaattggttgaggcagcacagcaagctgcggtagcgacagctactgatttcgccatatttcagaatcatggttaccaggggctgtatggtggattagatcagaaagccatccaccaactgaaggggctgaaaaagagtcagaagatcctggatcatatgggttcaacagaactggcggctaatctctttcgagctacccaaacagaagaaaaactcaagcgggatggcgtgaattcaaaacagcaagctaataccacacactttgatgtgggtagcaaggtgaggcaaaccattcaggaacttggcggaaccatgcctgaggagttgccgaccccgcaggtcagcatcaagcagttggaaaacagtgtaaaaattacagagaagaaatagcagaaactaaaaactctttttgttgattgagatacccgatgcgtaagccaaagtccaggtgcggtgaacacaatggctaaacattgcacctttcttttccacccctcaattttaacctattttttcttatgcattttctcagacaagaagtcagaagaatgcatctacgctacagaaaatagcgatttcacataactacaagttatcaatttcctctcaccttaaaaaatctcaatcgtgacaatacgcacaaatcgctaccctgccagacagatttttagggagagaaccatgctgttacacattttgtatttggttggcattactgccgaagccatgacgggggctctggcggccgggcgacgccgcatggatacatttggcgtaattattattgcgaccgccaccgcaattggcggagggtcagtgcgcgatattctgctgggccactatccgctcggctgggtcaaacacccggaatatgtgattatcgtcgctaccgccgcagtactcaccactatcgttgctcctgtaatgccttacctgcgcaaagtgtttctggtgctcgatgcgcttggactggtggtcttttctatcatcggcgcacaggttgcactggatatggggcacggcccaattattgccgttgtcgcggcggtaaccaccggcgtgtttggcggcgttttgcgcgatatgttctgtaaacgtatcccactggtattccagaaagagttgtatgccggtgtctcatttgcctccgccgtgctgtacatcgcgctgcaacactatgtttctaaccatgatgtggtaattatctccaccctggtattcggcttttttgcccgcttactggcgctacgccttaagctgggattaccggtcttttactacagccacgaaggacactaaggttcaaaacctgtgatctgctgggcagccagccaactgcccagcttcttgatttgcgcattttccttccattcaataacctgtctggcgcgccccgatccagtccccggcagctgctgccagaactgctccgtgctaaataaaagttgcgaccaggaccgttcatcactggcattaagcgccgcccgggttagcggtattcccattgccatcacccagcgagtaaaaggctgcttacgagccagattaaaccgatgccatagctgcgcacttttacttttcgcgatccccggcgtgttctgtaattgctctggcgttaataaaagccaggaaaagatatgctcaaagcgatgagtctgatgcagcgcgcgccagccggcctcaccaatgccatccagccccagaacctgttttgaccccagccagactaagcgtgaaatgaactgttcctgacaaacatcagaagcaaagtagcaggtcaacgagttaaagcggttttctggtggtgtcggttttgtacgttctgcaccgcgccagaccacatcatcaatgcgaggaataccctgaccggcaaggctgacgaggatctgatcaccaggcgcaatatcccactcctgccagcgcctgacggaaccaatattcacccgctggacttttttatcatccagcatgacaggtgcgagtgacgcaaccaccgatattttaccgctcttacccaccgcaaactgaatcgccttcacttcggcaacctgagctacaggttgatatttccaggccaccagccattctgcctggcctggtagccaatggcgggattcgggttctttcgcccntcgcacaaccacgccatcggtgacgaagggtaatttcgctttccaccactcattgcgtacgcgcgcaacctcatcagcatttttaaccgcacgggtatacctctgcgttagagtaaaacctgcggtagccagctcctttaaacgatcggtcattaactgcggtccatccggccatgcccagacaaaaacgcccagagaattcagcgtgtcgctatcgtcctggcgcatcatcaggccagcaacttttgcgcgggcatttattccccccatttgttgttggatatgcccctcgcgctggagaaatatttccccctgaagcgtactgttggctaaaggcccgctaacggtttgcggcacagcggaaattaagctaactttctgcgtccagtcctcgcctttcaggccattaccgcgactgattgctttgttcagtttcccgtcccgataaaccagggttaccgcaacgccatcaacttttggctgcacccaaagatcgctacgttctcgcatccacagacttaatgcgtttttatccgccattttgcgtacacccgtatgggcaaccggatgcataaccgcaccatttaaaggcggcatcatcacgtcgcggggctcgctcacaaagcagcgttgccactgcgtaagacgggcgcttaactgatcgtaaacaccgtcttccacctcactttttccttccttccagtagtcatcgtcccactgttttatttgctgttgcaggcggaaaatttcttcctgtgctctggctggcgaccaggccggacagaccgcccacacagatgattgccagcacaagatacttattaatatcgccatccatactttcatcttcacctccgctgtagtcaggctggcagatatacaacgtggtgaaggcaaagccgagtggcaaaaacggagtctgcgaggacgcttcctgagaatcgtctttattgcagtaaatcacaggcaaatgcggaaacagctacgcaaaacgcaacaactttgcgcaaaaagtgtgagcaagggctacgtcacatggccgcgccgtgtataataagctcgtatgtaggctttatttcgctaatcacatacgaaagatactcatggctcaaggcacgctttatattgtttctgcccccagtggcgcgggtaaatccagcctgattcaggctttattaaaaacccaaccgttgtatgacacccaggtttctgtttcacacaccacacgccaaccgcgtcctggtgaagtccacggtgaacattatttctttgttaatcatgatgaatttaaagaaatgattagcagagatgcgttcctcgaacacgcagaagtttttggtaattactatggcacttcgcgtgaggccattgagcaagtactggcgaccggtgtcgatgtttttctcgatatcgactggcagggcgcgcagcaaattcgccagaagatgccgcacgcgcggagtatctttattttaccgccgtctaaaattgaactggaccgccgtctacgcggtcgcgatcaggacagcgaagaggtcattgcaaagcgtatggcgcaagctgttgcagaaatgagccattacgccgaatatgattacctgattgtgaatgatgacttcgataccgcgttgaccgatttgaagaccattattcgcnccgaacgtctgcgcatgagccgccaaaagcagcgtcatgacgctttaatcagcaaattgttggcagactgaacctgatttcagtatcatgcccagtcatttcttcacctgtggagctttttaagtatggcacgcgtaactgttcaggacgctgtagagaaaattggtaaccgttttgacctggtactggtcgccgcgcgtcgcgctcgtcagatgcaggtaggcggaaaggatccgctggtaccggaagaaaacgataaaaccactgtaatcgcgctgcgcgaaatcgaagaaggtctgatcaacaaccagatcctcgacgttcgcgaacgccaggaacagcaagagcaggaagccgctgaattacaagccgttaccgctattgctgaaggtcgtcgttaatcacaaagcgggtcgcccttgtatctgtttgaaagcctgaatcaactgattcaaacctacctgccggaagaccaaatcaagcgtctgcggcaggcgtatctcgttgcacgtgatgctcacgaggggcaaacacgttcaagcggtgaaccctatatcacgcacccggtagcggttgcctgcattctggccgagatgaaactcgactatgaaacgctgatggcggcgctgctgcatgacgtgattgaagatactcccgccacctaccaggatatggaacagctttttggtaaaagcgtcgccgagctggtagagggggtgtcgaaacttgataaactcaagttccgcgataagaaagaggcgcaggccgaaaactttcgcaagatgattatggcgatggtgcaggatatccgcgtcatcctcatcaaacttgccgaccgtacccacaacatgcgcacgctgggctcacttcgcccggacaaacgtcgccgcatcgcccgtgaaactctcgaaatttacagcccgctggcgcaccgtttaggtatccaccacattaaaaccgaactcgaagagctgggttttgaggcgctgtatcccaaccgttatcgcgtaatcaaagaagtggtgaaagccgcgcgcggcaaccgtaaagagatgatccagaagattctttctgaaatcgaagggcgtttgcaggaagcgggaataccgtgccgcgtcagtggtcgcgaaaagcatctttattcgatttactgtaaaatggtgctcaaagagcagcgttttcactcaatcatggacatctacgctttccgcgtgatcgtcaatgattctgacacctgttatcgcgtgctgggccagatgcacagcctgtacaagccgcgtccgggccgcgtgaaagactatatcgccattccaaaagcgaacggctatcagtcgttgcacacctcgatgattggcccgcacggcgtgccggttgaggtccagatccgtaccgaagatatggatcagatggcggagatgggtgttgccgcgcactgggcttataaagagcacggcgaaaccagtactaccgcacaaatccgcgcccagcgctggatgcaaagcctgctggagctgcaacagagcgccggtagttcgtttgaatttatcgagagcgttaaatccgatctcttcccggatgagatttacgttttcacaccggaagggcgcattgtcgagctgcctgccggtgcaacgcccgtcgacttcgcttatgcagtgcataccgatatcggccatgcctgcgtgggcgcacgcgtngaccgccagccttacccgctgtcgcagccgcttactagcggtcagaccgttgaaatcattaccgctccgggcgctcgcccgaatgccgcttggctgaactttgtcgttagctcgaaagcgcgcgccaaaattcgtcagttgctgaaaaacctcaagcgtgatgattctgtaagcctgggccgtcgtctgctcaaccatgctttgggtggtagccgtaagctcaatgaaatcccgcaggaaaatattcagcgcgagctggatcgcatgaagctggcaacgcttgacgatctgctggcagaaatcggccttggtaacgcaatgagcgtggtggtcgcgaaaaatctacaacatggggacgcctccattccaccggcgactcaaagccacgggcatctgccgatcaaaggcgctgatggcgtgctgatcacctttgcgaaatgctgccgccccattcctggcgacccgattatcgcccacgtcagccccggtaaaggtctggtgatccaccatgaatcctgccgtaacatccgtggctaccagaaagagccagagaagtttatggctgtggaatgggataaagagacggcgcaggagttcatcaccgaaatcaaggtggagatgttcaatcatcagggtgcgctggcaaacctgacggcggcaattaacaccacgacctcgaatattcaaagtttgaatacggaagagaaagatggtcgcgtctacagcgcctttattcgtctgaccgctcgtgaccgtgtgcatctggcgaatatcatgcgcaaaatccgcgtgatgccagacgtgattaaagtcacccgaaaccgaaattaatgttttatgaacccaacacgttatgcacgcatctgcgaaatgctcgccaggcggcagcctgatctgaccgtctgcatggagcaggtccacaaacctcataacgtttctgcgattattcgtaccgcagatgccgttggcgtacatgaagttcacgccgtctggcctggtagccgcatgcgcaccatggcttcggcagcggcgggtagtaacagctgggtacaggtgaaaacacaccgcaccattggcgatgccgtcgctcatctcaaaggccagggcatgcagattctggcaacccatctttctgataacgctgtcgatttccgcgaaattgattacactcgcccgacctgcattttgatgggacaggagaaaacgggcatcacgcaggaagcattggccctggcggatcaggacatcatcattccgatgatcggcatggtgcagtcgctgaatgtttccgttgcctcagccctcattctttacgaagcccagcgtcagcggcaaaatgcaggcatgtacctgcgtgaaaacagcatgttgccggaagcagagcaacaacgcctgttgtttgaaggcggctatccggtgctggcgaaagtcgcaaaacgcaaaggcctgccttatccccacgtcaatcagcaaggcgagatcgaagctgatgccgactggtgggctactatgcaggctgcagggtaagtgccatgacaggtcgcctgttagatgctgtcccactcagttccctaacgggcgttggcgcagcacttagtaacaaactggcgaaaatcaacctgcataccgtgcaggatctactcttacaccttcccctgcgctacgaagatcgcacccatctctaccccatcggagaactactgccgggcgtttatgccacggtggaaggcgaagtgctgaactgcaatatctccttcggcggtcggcggatgatgacctgccagatcagcgacggttccggcatcctcaccatgcgctttttcaatttcagcgcggcaatgaaaaatagcctggcgacgggccgccgtgtactggcttatggcgaagcaaagcgcggtaaatatggtgcggagatgatccacccggaataccgcgtgcagggcgatctcagcacgccagaattacaggaaacgctcacgccggtttatccaacaacggaaggcgtaaagcaggccacgctgcgtaaattaaccgaccaggcgctggatctgctcgacacctgcgccattgaagaactcctgccgccggaactgtcacaaggaatgatgacgctaccggaagcgttgcgcactttgcaccgcccgccaccgacgctacagcttagcgatctggaaaccgggcagcatccggcgcaacgtcgtctgattctggaagaactgctggcgcacaacctcagcatgttagccttacgtgccggagcacagcgttttcatgcccagccgctgagcgccaatgatgcgctgaaaaataaactcctcgcagccttaccgttcaagccaacgggcgcacaggcacgcgtagtggcggagatcgagcgcgatatggcgctggatgtgccgatgatgcgcctggtacagggcgatgtaggttccggtaaaacgctggtcgccgccctcgccgcgctgcgtgcgattgcccacggcaaacaggtggcattgatggcaccaaccgaattactcgccgaacagcacgccaataacttccgcaactggtttgaaccgctcggtatcgaagtgggctggctcgccggtaagcagaaaggcaaagcgcgactgtctcagcaggaagccatcgccagcggtcaggtgcagatgattgttggtacgcacgccatcttccaggaacaggtgcagtttaacggtctggcgctggtgattatcgacgaacaacatcgctttggcgtgcatcagcgtctggcgttatgggagaaaggccagcagcaaggcttccatccgcatcagttgatcatgaccgccacgccgatcccccgcacgctggcaatgacggcgtatgccgatctcgatacctcggtgatagatgagctgccgccaggccgcacgccagtgactacggtcgctattcctgatacccgccgtaccgacatcattgaccgcgtgcgccacgcctgcataactgaaggtcgtcaggcgtactgggtttgtacgttgattgaagagtcagagttactggaagcgcaggcggcggaagctacctgggaagagttgaaactggcgctaccagaattgaatgttggcctggtacacgggcggatgaaaccagccgagaaacaggcggtgatggcgtcgtttaaacaaggtgagctacatctgctggttgccactaccgttattgaagtcggtgttgatgtgcctaacgccagcctgatgattatcgaaaaccctgagcgtctgggtctggcgcagttacaccagcttcgcgggcgtgtaggtcgtggtgcggtggcttctcactgcgtgctgctctacaaaacgccgctctccaaaaccgcgcaaattcggctgcaagtgctgcgcgacagcaacgacggttttgtgattgcacagaaagacttagagattcgcggaccgggtgaactgttaggtacgcgtcagacgggtaatgctgagtttaaagtggcggatttactgcgcgatcaggcgatgatcccggaagttcagcgcctggcgcgacatattcacgaacgttacccacaacaagcaaaagccctgatagaacgctggatgccggagacggaacgttactccaacgcatgaccagactcatcacaagacaagtcacgcagtaaatcttcaatctggatagtgaggatatccattgcctcatacgcatcctgtgcaattcgcgccgccattgcgccttccggttcaccacgcagaatttcagccgctgcctgtacgccagccacaatcatttcaggtgttaacatttggcgaagaaaagcgcgattatcagaggaccagccatctttatggcctaatggatgcccccagcctatccattcttgcgaccataacggattggcttctatgggataaattagatgcgcggcatactgaatagcacacaccgcttttcctggcgtatccagcgcccaccagcgcgaccagagagaacgaattaacggcgcggccccacccagagtattgaacaccgccagccagcaaagaacgttattgaaaccacgctcgttatccatacgctgcaacgcggtgtccagtaaaaattgccgtacctgctggcgttgggaagcattcatcatctcctgccagagatagggccgacacaatgccttcattaaggattcttcgaagtgatcaccataaccgccagctaaaacggtttcatgccattgcgccaggcagagcggaaacagatagcgaaacaactctatttgcatcggttcgttataaacgagattgagtacatagtaagcactcaaatcccattcgctgatctgctgccactctttagccgccagcgccttgagttcggcatctgcgtaatcaaattccgtttcccatacacagagcactggcggctcatcaccaaaaatatggcgacagtgttcacgtagcgtttccggttccttccgacgctttttcatttttaaccggcaaaaatcggcaacattaaatacagcttaatcaccagcgcattgacgatatcgataaagaacgcaccgaccatcggcaccaccaaaaacgccatgtgcgacgggccaaagcgttcagtgatcgcctgcatgttggcgattgccgttggcgttgcaccgaggccaaaaccacagtgacccgcagccagcactgccgcatcgtagtttttgcccatcatgcgccaggtaacgaagatggcatacaacgccatgaagatggtctgtaccaccagaatcgccagcatcggcagcgccagcgaagccagctcccacagtttcagccccatcagcgccatcgccaggaacaacgacaggcttacgttacccagcacggataccgcacgctcaaagacgcggtaaaagcccatcattgacagaccgttgctcagaatcacgccaacaaacagtacacagacgaaggtcggcagttcaaaagcagtgccagccaaaagttgcgcaacaattttccccaccgtcaggcagatagcaatcagcgcgatagtttcaatcagcaccagcgaggtgatcatgcggcccacatccggcttttcaaacgccgtcgggacttcctggtcatccggaataccgttcggcgtggtggagtgtttcaccagatagcgcgccaccggaccgccaatcaagccgcccagcaccagaccgaacgttgcacaggccatcgccacttccgtcgcattggtgaagccataacgttcaatgaacaatttantccacgcagcgcccgtaccgtgaccgccggaaagcgtaatagaaccggccaacagccccatcagcggatcaagccctaacaggctagccataccaatgccaatggcattttgcatcaccaacagaccaacaaccacaatcaagaagatgccaaccacacgcccaccggcacgcaaactggcaatgttggcgttcaggccaatggtggcgaagaaagccagcattaacggatcgcgcagggacatatcaaagttgacttcccagcccatgctttttttcagtantagtagcgccagcgccaccaacaaaccacccgcaacaggttccggtatggtgtatttcttcaaaaaggagacggaatggaccaacttacgcccgagcagcaacgtcagcgttgcggcaacaagcgttgctaaagtatcgagatgaaacatagttactcctttgtatccgcatcactctttcatactcgtcatacttcatcgcgcagtggcaacttcatgaactatgacgggtatcgagttatgctttcctgggtcaaattctcagctgttaatgaacaaatggcatggattttaagcagaaaaataccaaaagttatataaaaaagtgcatttatctcatttaaatatttagatgaggatgtggcaaacgtttgcttttctctttcggtcagctaaaatgcccgctttgctaccacgggattgttttcgatgtctgtttccaccctcgagtcagaaaatgcgcaaccggttgcgcagactcaaaacagcgaactgatttaccgtcttgaagatcgtccgccgcttcctcaaaccctgtttgccgcctgtcagcatctgctggcgatgttcgttgcggtgatcacgccagcgctattaatctgccaggcgctgggtttaccggcacaagacacgcaacacattattagtatgtcgctgtttgcctccggtgtggcatcgattattcaaattaaggcctggggtccggttggctccgggctgttgtctattcagggcaccagcttcaactttgttgccccgctgattatgggcggtaccgcgctgaaaaccggtggtgctgatgttcctaccatgatggcggctttgttcggcacgttgatgctggcaagttgcaccgagatggtgatctcccgcgttctgcatctggcgcgccgcattattacgccgctggtttctggcgttgtggtgatgattatcggcctgtcgctaattcaggttgggttaacgtccattggcggcggttacgcagccatgagcgataacaccttcggcgcaccgaaaaatctgctgctggcaggcgtggtcttagccttaattatcctgcttaaccgtcaacgtaacccttacttacgcgtggcctcactggtgattgcgatggcggccggatatgcgctggcgtggtttatgggcatgttgccagaaagcaacgaaccgatgacgcaagaactgattatggtgccaacgccgctctattacggtcttggcattgaatggagtctgctgctgccgctgatgctggtctttatgatcacttcgctggaaaccattggcgatatcacggcgacctctgacgtttccgaacagccagtgtccggtccgctgtacatgaaacgcctgaaaggcggcgtgctggcaaacggcctgaactcgtttgtttcggcggtgtttaacaccttcccgaactcctgcttcgggcaaaacaacggagtgatccagttgactggtgttgccagccgctatgtcggttttgtcgtcgcgctgatgttgatcgtgctgggtctgttcccggcagtgagcggttttgtacaacacattccagaaccggttctgggcggcgcaacgcttgtaatgtttggcaccatcgccgcctccggtgtgcgtatcgtttctcgtgagccgctgaaccgtcgggcgattctgattatcgcgctgtcgctggcggttggtctgggcgtgtctcagcagccgctgattttgcagtttgcccctgaatggctgaaaaacctgctctcctccgggatcgccgcgggcggtattactgccatcgtgctgaatctgattttcccaccagaaaaacagtaattcactggcggcggtaagataattaccgccgcagtctcacctctttcaccattcccgccttgaggattgcgcgtaaatcgtgcataactcccttatgtgcatttcacgggatggaagaccatgaaatttattgggaagctgcttctctacattctcatcgctctgttagtggtgatcgctggcctctattttcttctgcaaacccgctggggagcagaacatatcagcgcatgggtttccgagaatagcgactatcatctggccttcggggcgatggttcaccgtttttccgcgccatctcatatcgtgctggagaacgtcacgtttggtcgtgatggtcagcccgcgaccctggtggcaaaaagtgtcgacattgcgctaagcagtcggcaactgaccgaaccacgccatgtcgataccatcctgctggaaaacgggacgctgaatctcaccgaccagaccgcgccgctaccgttcaaagccgatcgtctgcaactgcgtgatatggcgtttaatagcccgaatagcgaatggaaactgagcgcgcagcgggtaaatggcggcgtggttccgtggtcaccagaagccggtaaagtgctgggtacgaaggcgcagattcagtttagtgccggatcgctttcgctcaatgatgttcctgccaccaatgtactgattgaaggcagtattgataacgatcgcgttacgctgactaacctgggtgccgacatcgcccgcgggacattaaccggaaacgcgcagcgtaacgccgacggcagctggcaagtggaaaatctgcgcatggcggatatccgtctacaaagcgaaaaatcgctaaccgacttctttgcgccattacgctctgtcccgtcgttgcagattggtcgcctggaagtgatcgatgctcgtttgcaaggtccggactgggcggtgaccgacctcgatctcagcttgcgcaacatgaccttcagtaaagatgactggcagacacaagaaggcaaactgtcgatgaacgctagcgagttcatttatggttcgctgcatttatttgacccgattataaacgcggaattttccccgcagggcgtagcgctgcgccagttcaccagccgctgggaagggggtatggtcagaacgtcagggaactggctgcgtgacgggaaaacgttgatccttgatgatgcggcaattgccgggctggaatataccttgccgaaaaactggcaacagttgtggatggaaacgacacccggttggttaaacagcctgcaactgaagagatttagcgccagccgcaatctgatcattgatatcgaccctgacttcccgtggcagctcaccacgctcgatggttacggtgccaacctgacgctggttaccgatcataaatggggcgtctggagtggctcggcgaatctgaatgccgccgccgcgacattcaatcgtgttgatgttcgtcgcccgtcgctggcgctgaccgccaacagcagcacggtgaatatcagcgaactgagtgcatttactgaaaaaggcattctggaagccactgccagtgtttcacaaacgccacaacgtcagacccatatcagcctgaatggacgcggtgtgccggtgaatattttgcaacaatggggatggcctgaattaccgttgactggcgacggcaatattcagcttaccgccagtggcgatattcaggccaatgtcccgctgaaacctacggttagcgggcaactccatgccgtgaacgccgcaaagcagcaagtgactcaaaccatgaatgcgggcgtcgtttccagtagcgaagttacatcgacagagccggtgcagtaaaaatcaatctcgccgggtacgactcagacgtacccggcattccatcaatagattacaacgtaantgtcagcgcattcccttgaggcgtcaccaccagcccctgctcactttcagcctgcgaaccaccttgcagaccatttactttcacaatattgcgcaagcacagtgtccagttcttcgcctcgcccgcaccagtcacagtaatcgtgttgccagtacgcgccgctttcagggtgaaaagaacggaaccgtcagcagcgggcacttcacagatggcttcatgcccgtcttgtagattaaagagctggaatgccgtgccttcgtgccacgcgtaatcgggacgttgctcgttgttgcccagcgccagtagggtgttatcacgcacataaacgggcagactcaggaagctgtgctgctgtttatgccagcgactaccatcgagttcatcgttgtgccacagatgtgtccagcgaccttccggcaagtagaactgcacatcgcccgcttcactgaacaccggagcaaccatcacgttgtcgcctaacatgtattgacggtcaaggtaatcacaagccggatcgtccgggaactccatcatcatggcccgcatcatcggcgtaccccgcgcgttcgcacgagcagcttcacgatacagatacggcatcatgcggcatttcagttgcgtgaagaagcgcaccacatcacaggactcatcatcgtaggcccacggcacacgataagatttgctgccatgtaaacggctatggctggagagcaaaccaaacgcgcaccagcgtttgtaaacgtgcgccggagcggtattctcaaagccgccgatatcgtggctccagaaaccaaaacctgaaaggccaatagacaaaccaccgcgcaggctttccgccattgattcgtagttagcgtaacagtcaccaccccagtgtaccgggaatttctgcgcaccaacggaggccgagcgagcaaacaagacggcttcttcctcgccaacggtgtccttgagcacgttccacaccagttcgttgtagatgtacgcataatggttatgcattttctgcggatcggaaccgtcaaaccactgaacatcgattggaatacgttcgccaaagtcggtcttaaagcaatcaacgcccatcgcgaccagacctttcagtttgtcggcgtaccatttgcaggcatccggattggtaaagtcataaatcgccagacctggctgccatttatcccactgccataacgaaccgtccgggcgtttgagtaaatagcctttctcttgtaactctttaaagacaggggatttttgcccgatataggggttaatccagacgcagatttttagccctttcgctttcaggcggcggatcatcccttccgggtccgggaaagtcagcgggtcccactcaaaatcgcaccactggaaggctttcatccagaaacagtcaaagtgaaaaacatgcagtggcagattgcgtcccgccataccatcgataaagctgtttaccgtcgcttcgtcgtagttggtggtaaatgaagtggttagccacaggccgaaggaccacgcgggcggcagcgccggacgaccagtaaaacgggtataacgatcaagtaccgctttcggcgtcgggccgtcgataacaaagtattcgagatattcactctcaacgctgaactgcactttggagactttctccgatcccacttcaaaagagacgcattgaggatgattgaccagtaccccatagccacggttagtcatatagaacgggatatttttatacgcctgttcagtacttgtgccgccgtcccggttccaggtctctaccgtctggccattgcgcaccagggcagtaaagcgctctcccagaccgtaaactgtttcgccaacgccaagatccagccgctcaaacatataatttcgttgattattcgtgtcctgcacgtagccattatttttcacctgactaccggtaatacgttcgccgttgcgcagaaaatccagtgaccagaactcacctttgctgacacgcgcgcttaagttgccacttttaaactcagcgtaacgttctgtgttttcgattgtgaccttcacgtcctgcaaaatattgagcggataatgaggaccgttattcagcgccccctgaaaatgctcaatccgtacaccgacaataccttcctgtggggagaaaaagcgcagcgtaaataaaggcgtatcaagctgccaggttcgttcacgcacatcacggggggcagcatagaccaccatttcattaccctgctgttcaacctcgaacacctgaagcgggtgaatcaaattgaggccaggttgaatcaaccagtttccgtcgctaattttcattgccgttccttagttctgcacttcttgagaggtgaattgttgctggcaacggcgtttgccctgggccagctgttccataacggttttcagattgtgcgtcgtgagtgagtagtagcgtttagcgataatcgcgctcagcaaataacagatcgccggaacaatcgtgaatagcgcaataatgatgctaatcgtggcgctgttctgcgctttttctgccgcatcatatccgccataagccagcatccagccgataagagcgccgccgaaggccaaccccagtttgagcacaaacagcgtgccagcaaaactgatcccggtcaggcgtttaccattgcaccactcgccgtagtcgacggtatcggacatcattacccactggataggtgtcaccagttgatgcaatacaccaatcacgaagatgaagacaaacatagtgatgctggcctgcataggaacaaagaacatcgcgaggctaatcactgccagcagggcgttcgtccaccagaagatagtgactttacatttccagtcggtcagcggttttgccagtgcggaaccaatcaggttacccacgcaataagtggtgagaaaagcgacaaacacttccggcgtacccaaaatccatgtgacgtaatacatcatcgctccaccgcggacgcacaccgccaggatattgaaaatggttagtaaaccgacaatccgccactggtcgttttgccagatatcacgtaaatcttcccgcatagacgtcgttgtaggtggtgcttcaacgcgttctttagtggtgaagaaacagaatgccagcatcatgaatgccaccacggaaaggaccgcgataccgccctggaaaccgagtggtttattatcaccgccaattaaattaaccagtggcatcatcagaacagtagagagcatgcctcccgcggtcgccagcacaaaacgccaggattgcagcgagatacgctgagtcgggtcattggtgattacaccacccaatgcgcagtaagggatattgacgacggtataaagtaaggtaagtagggtgtaagtaattgctgcatagatcattttgccgttcatactgagatctggcgtgctataggccagtacacagacgatcccaaatggcagtgcgccacacagtacccacggacgaaatttaccccagcgagagcgcgttcgatcggccaacaaccccatgcaaggatcggaaatcgcatccagtgcacgagcgaccaaaaacatggttccgacaaatccggcaggtatgccaaaattatcggtataaaagaacatcatatataacattacgttatcgaaaataatgtggctggcggcgtctcccatgccataaccaattttctctttaacggacaacacttcactcttcatctgcttttccttgatgctataggggtgctgagaccgataacgcattttgtaaaccatccctgtgagagcgaatattccgatatctggttattaatttatgattcttgttttatgtgatcgtggtagcgttaattccgctcatatatcattgtaaaatatgggttttatatgaattataatgctttcgtgataatacgctgcgtgtattaggcggaaaaaactgatctgggggatgtagaaactcaaggaagtagctataatgcgccccgcctccatgtagcaatcgaggcgcggaagatcgtcgtctccggtgaggcggctggacttcaaatccagttggggccgccagcggtcccgggcaggttcgactcctgtgatcttccgccagtttgcctctcctgaactctcccgacatcaacaaagccccttataatcccttatatatcaggttttctttgtatcctgaggtcaaacgactttaacccatatcaagttgtttgtgggggtgcattgggggtatcaggttggttactggcggaaattcccccaggaggatggattcatcaaaagctggaggatgtcatggcgctaaccgatgttaaagtgaaaaccgcgaagccaaaagaaaggccctataagctggctgatggcggaggtatgtatctgctgattaacgctaatggttccaaatactggcgtatgaagtaccgcttcgccggtaaagaaaagatgctgtctattggcgtataccccgatgtaacgcttgccgacgcacgtgagaaacgcagtgaagccaggaaaatacttgcggctggtggcgatccgggtgaggcaaaaaaagaagaaaaaatagcgctgcaaatgagtttgaaaaacnctttcgaggccgttgctcgcgagtggcatcagacgaaagccgatcgctggtcactgcgctaccgcgatgaaataatcgacacctttgagaaagatatcttcccctacatcggcaagcgacctattgccgaaatcaagccgatggagctattggaagcactacgtaagatggagaaacgtggagcactggagaaaatgcgcaaggtccgccaacgttgtggtgaggtgtttcgctatgcaattgttactggtcgagccgactataaccctgctcccgatcttgccagtgctttagctacaccgaaaaaagtacattttccctttcttactgccaatgaacttccccacttccttactgatctggcgggttataccggaagtatcatcactaagacagctactcagatcattatgttaaccggtgtacgaacgcaagagttgcgtttcgcgcattgggaggatattgattttgaggcaaaattatgggagatcccggcagaagtaatgaagatgaaacggcctcatattgtgccgccctctgagcaggttattgcgctatttaagcaacttgaaccaatctcaaaacatcatcctctggtctttatcggtaggaacgatcctcgcaagccaattagtaaggagagcattaaccaggtcattgaattgctggggtataagggaagactcacagggcacggtttcaggcataccatgagcacaattctgcacgaacaaggctttaattctgcctggattgaaatgcagttggctcatgtggataaaaactccatcaggggtacctataaccacgcccagtatctcgatggtcgccgtgaaatgatgcaatggtacgctgactacattgattcactttctgagctggcctgatgaatgaaagttcggtgacacaaaaataatgaataaccatccagccccaacaggcggatggttgtagtggcacagtaaatttggccacctgattaaaggtgatatcctcaccacaacacaaaacaggtgacttaatgaacaagaaaaccaaacgtactttcacccctgaattcaggctggaatgtgcacagctaattgttgataagggctactcatatcgacaagccagtgaagcgatgaatgtcggttctaccacgcttgagagttgggtgcgccagctcaggcgagagcgtcaggggattgcgccctctgccacacctattactccagaccagcaacgtatccgcgaactggaaaagcaggttcgccgcctggaggaacacaatacgatattaaaaaaggctactaccgcgctcttgatgtccgactcgctgaacggttcacgatagttgccagactgagtgacagccactcagttgtcagcctctgttctgctctggaaatacaccgcagcagttaccagtactggcgaaaacgacgcgatacggttaatccggcgcgagtcaggttgtgcagcgaaatacgccgggcgtggaaccaaagtaggggctctgcgggggcgcgcacgctggctgaaatgctgacccaaaacggcgtcccgatgagccgttaccgtgccgggcgtctgatgaaatatctgaacctgagcagttgtcagcccggaaaacatcagtacaaaaatgctcgtcaggaacatacctgcctgccgaatctgcttgagcgccagttcgctgtgcccgagccagatagggtatggtgcggagatattacgtatatctgggcaggaaatcgctggtgctatctggcggtcgtcatggatctttttgcccgcagggttatcggctggagcctgtcagcgaatgccgatactgccctgataagcagtgccctgcggatggcgtatgaggtgcgtggtcagccgcgggacgtcatgttccatagcgaccagggaagtcaatatacaggactgaaatatcaacaacttctctggcgttacaggataaagcaaagtgtcagccgacggggaaactgctgggataacagtccaatggaacgcttcttccgcagtctgaaaacagaatgggtgccaaccgatggctacacaggcaaagacgtggcccggcagcaaatcagcagttatattctgaattattacaatagcgtcaggcctcaccattataacggagggctgacgccggaagagtcagagaacagatatcatttttactgtaaaaccgtggccagtattacttgaccactacactggaactcatgctcaccagcggtgagctgaatccccgccatcagcataccgtcacgctgtatgcaaaagggctgacctgcaaagccgataccctcngcagtnntggttacgtttatctggctgtttatccgacgcccgaaangaannnnnnnntnnnnagaatagccttctgctacggcctggtgttttcaccacgccacnnnnnnattnnnnnnnnctgcatatcaggaaaatcttcagtatgaaaacattnnnnnnnnnnnnnnnnnnnnnnnnnnnnnnnnnnnnnnnnggcctcacactgaatgacacaccntttgccgatgaacgtgtgattgagcagcatattgaggcaggcatttcactgtgtgatgcggtgaactttctcgtggaaaaatannnnnnnnnnnnnnnnnnnnnnnnnnnnnnnnnnnnnnnnnccagccgggattcagcgcctgtacccgctctcagttaataaacagcatcgatatcctcctggctcgcagggcgaccggcctgatgacccgcgacaattacagaacggtaaataacattaccctgggtaagcatccggaggcgaaatgatgaaactggccctgacactggaagccgacagcgttaacgtacaggcactgaatatggggcgaattgtcgttgacattgatggtgttaatctcgctgaactgattaacatggtctgcgataacggctactcccttcgtgttgttgatgaatctgaccggacctcagcagactgcacgccaccatttactgcccttaccggcatacgctgcagtaccgcacatatcacggaaacggacaacgcctggctgtactcgctgtcacaccagaccagtgacttcggtgaatcagaatggattcattttaccggtaacggctatctgttgcgtaccgatgcgtggtcgtacccggttctgcggcttaaacgcctgggtctgtcaaaaacgttccgtcgtctggtcgtcacactcatccggcgttatggtgtcagtctcattcatctggatgccagtgccggatgtctgccaggtttacccacttttaattggtaactaggaacaacatgacatcattaaccccggaagcagcactggatattctgattgcgtggctgcaggacaatatcgacagcgaatccggaattatcttcgacaacgatgaggataaaacggattcggcagcattgttgccctgtatcgaacaggtcagggaagatgtccgtaccctgcgccaactgcagcttctgcaacagaaccggtgagtctcactcaccatacttcattccactgacgccagcctgaacagggctggcgttttcgtttataaaccaaaaggaaaaccgataatgtcaggcatcataatctcccgtccggaagtggacaccgggcatacggacgttatctgctccaccagtatccgncacgttgtgacggtacggaatgcagcactgcaacaaaccgaaacgcttatccggcaactggcagaaatctcagtcctgacagcagcagacattggcggcaaaaccgccctggaccgggcgatgaaacaggattttcactgcggctgctggctgatggagaaacctgaaaccgcaatgaaagccatcacccgcaacctcgactgcgaaatctggcgtgacctgatgcaacgctccgggatgctgagtctgatggatgcacagggctaggatacatggtaccgctcactggagtacgataatattccggaaatcagcgaggcgaatatcatgaatgcattcaaacaactgcaccagagtaaggatgaagtgtttgagcgnggggtgatcaacgtcttcagagggccgaacggaattacaaaaccaattccccctgtaaattcggcagtaaaattatcgtcaacaacntggtgagatggtacagatggagatttcatcttatcagtggaatgcaggcagatcgcttagctgacctggaaagaatgttgcatctgctcagcggtaaaccgctccccaacaaccgagggaatatcaccattaatctggatgaccacctacagtccgttcagggtaaagagcgctatgaagacaagtaaatactttaagaagggcccgcacacatcacattcagaaagccagagctggttgacaggcttaatgatattattgccagacactacctaggaatgttaccttcacaaaaatctctaagaattgattcaattgtgtattttagcctcattccctcatgtaaagtcatttgggggttattatgggggtcaatcatttnnacgcattaatcatttaaaatcaatgcattaataatcatattcgactcctgtgatctccgccaaacttcctcttctgaactctcccgacgtcaacaaaaccccttttaatcccttatatatgnngctttctttgtgtacaggggtcaaccgactcaacctgtatcaagttgcttttgaggatactttagggggtattatttcctcttgaaatattagcaccccataatgggaaaaaggtaatacataacaatggtttttaacagtatctttgttatacaagggggcattgaggatatcaggaaaaatctcaaaatcggtacggacaggaaactacgtgggcagcaaaaacgtatggtaacaccgggaaatgcaacgcccaccagtcgggctaatccaccactccaatcgtggttcgcagtactgcacacacgattaccgggctatacaggagcggtttggtctgaaaacatccatgccgcgtaaaggtaaccgttacgacaacacctcaatgaaaaacttatagtaaacgctgaagaatgaaactatcgttttaataaccgggatgaagccatctaagtaatacggaaatacattgagattttctacaaccatcagcgccgccactcccgtctggggaatatctccctggtagccttcaggaaaaatataaccagataactgcgtaaaaaaagaacaaatggtggtgtccgctattgccagtatacctgagtttactgcctttcagattatcacaatcaatagcgaacagacttttgagctctgtgcgcttttaacaaaacgtccctttctccactttcaccgtataataatacattatttattacccctccaataaaaaccgatattactaatcacatttattaccacacaatttgatatcggtttttattagttggttaccctttcttcgattgctcataggcagctaaatgatcttttaatgcctgtgcaatgnnnnnnnnnnnnnnnnnnnnnnnnnnnnnnnnnnnnnnnnnnnnnnnaaacnnaaagcctnnngacctnnnnnnnnnnnnnnggcagccaagtgctcttttaatgcctgtgcaatgggcggtananntcgggatgccccggatgcctgtccacttgtnngtgnnngnnnnnnnnnnnnggcgggcttaaaacnnannnncnnnnnnnnnnnnnnnnnnnnnnnnnnnnnnnnnnnnnnnnnnnnngcctgtgcaatgggcggtaaaggtcgggatgccccggatgcctgtccacttgtcggtggcggcggtgcctgacgggcgggcttaaaacctaaagcctcaggacctttcgatttttcataggcagccaagtnntcttttaatgcctgtgcaatgggcggtaanngtcgggnnncnncggatgcctgtccacttgtcggtggcggcggtgccggacgagagggagtaaatgaagtcacctggctgctcacattaaaaatcgttctcgcattaacattcgacgagcctggagaaaaaggggaatgaactttcaccggagtaagacgcacggcctgaggggctacagaaaatccagttccccccgcagagctcactcgacttgcgatacctacaagctgccgccctagtgtagaagcagcgttactaattccattaagcataatttatgcctctttatatctaagcttggctaactctcatatatatcaaaacgaataataaaatgatttttaaatcaatataaattaaaatcctcgtacccagccactaccattctcatggaccaaactgtacaataactgactcgtctcatcatccatacagtcctccaaagcctttaccgcatcattttttctatttaatccaaataagataataaattctaaatgtgcgatatcttttttatcaggtataatttgtgggaatacattcaggatagcttccgcanatttgggaagcttatggtttgccgcagctacagccgcccacaccagtatcttattagcagaaatatcattaaccattaaaattaaaaactacggttagaaatggttgagaccagatcttttatcgttttcaacattccactttctacgttaacataagcagaatattgctgaaccgcaaactgcaactctaacattttttcagggtcattaaccaaatcggtgctattaagtaactctggcacagaatcgctcagcgttttacctacttcacccatttgttgagtaatttcagataaattcattaaatttccctcagaagttaataaaataaaaacttttaactatttacgttcattacgaaccaaattccgtcttctgtttcttgctgcacggcaccctttctgatgaagtaattaaacaactcttcgcgcttttgacgttctgaatctgaaccaatcttagatttcatcgcgctgattttcttaatacccgaaaaatggtgatacaactcttcgagcaaatgagtcagcgataaaacagggccgttaagccctgtttggttacgtgcttcaaaagagcacaaaatcagttcttgttcatccagtctgtacgctaatgaaaaaaaaggtgtctcaatccgccatccgataaaaaaggcactgccacaaagaaactccttctgtattgtgtaccctttttgttcaagatagtaattaaacacttcatcattaaacgtatcgaccatgatcaattacccagctaagcgacccgattgccccatacgattctggacctcaaggagatcgcggacagcggacgttatatcacgcagacgagtcgtgatatcatcctgcgttctgcgaacgtcttgtttatacagctccagattcccctgctggaagttttccagcgacttcgcacgttgttcattaacctcatgagtcgatttgacggactcagatattgttgttggcaacgttttcgtaccttcagcaagactggtcacggcaacaaatgctgtggtattggtcagtttatctacggaattcaacaacttattgattctgcttgtcttctcggcggcgtctgcaagatcttcagcaaagtcagaggctttcgcaacatcatctgcaacgccagatgcacggctggctgctttcgttgttgtggccatcgctttctgcatcgcactggatgcctcctctgcgacatcagcaacactttccgtagccttgaccagagctttatttgcaacctcagaagccgcaccagcagcctttgaagatgcagagcttgctttttcagcaatctcaccagcccctttagccgcgttgttcattgctgcaaaagaacctaagatccccaatgctgatgaaataatcccgccaaccaaagcagcggttgccgcggcttttttttcctcaatagctttattctggctctcaaaaacggcctgctgaatctgatagctttgcgccaattgtttttgttggtaatcctgcaatagagtcaccatcttgccgaggagtttttgaatttccagcatcagcttacaaatatcaaccttaccatcagtaagcagagatgaatcaattgataaagcagatgcggcaactgcactggaagcgccggtcgtactctccgaagcggaattaaccatcgttacttgagtattatcaatagtattcataataaaattctctttaataattaaattcggccactaacaatacgactatttacccgtgctgaatcggacatcagttgagaaacactttgtaaatagctcgcctgattttgtaactcgcttgccgctttatccagctcgagcttcgcactctcacctaagctttcactctgtcgagttaagttttgcaccgcgaaagcagctaactgagacaacatttggagttgcgcagcctcattattcaacgcagttgtcccggcagaacgaataccgttcgtaacgccctcagccactgtcgagatttttgcaaanncgtttttaaccagcgcttctgccgccttctcaacgacttttacaacgcttgagccaattttgttagcaacattaccaaatttagataacagtgaagacaccccgccaacgccggctgtcagaatgcttgcggccatagatattccgccaaagacctgtgctgcagtctttaatccctgaggggcattttcccccattacatcgactgccgtttgcagtgccattgctgttgcaccaatggcaacaacagcccagagtgctgggttaaaaacagcggcaacggctgttaatgcgacgcccaaccaaccaaagacctggccaacaattttacttttttgtgatttctcttcggctttctgttgttcttcgagctgttttttatactcctgcgttttattctccagcgctttagtttgcccatccatataaatctcgttagagtttttcagactcgagactttctgcgcggaagtatccagggataacagagtgaccatcatcatcatttgctgagggtcaacggtattcacctgagagagatagggatagcttgtgcgctgtggctctgcctcctcagtgcgacttgtaacctcaccactaataccaccaaacaatttactaaggacatcctcagcagcagagggcgtcactaatgagtgacctgccggcggcgtcggtaaagggctactttctgtccagcctgctgacgagttcatggatttaaccagttgtaaatccagcgataaacccgtttcagattgagtaataccagaagtacccgaggcggtattaaccccagacgttacagacagggtatcgttatttacgttaagcatagttatctccggttatttaccaagggatattgctgaaatagttctatattgtagagattgcacatcagaacgtgcactcgttaagagatttaatgtattcgacatttgctgaatttcgagctggctattattcactaccgttgtcaggttattcgctttagctgaaatagccgccttcactgtttgcagatcaccagcgcttaaatcaccactaagatcactaataccagttacacttatgtcattacgtggatcgtttatatagtcaatcacgtcttgaggaagtttggctttcgcattcttatcagtgctactctgaacatcagcaattttggcatccacaagattagccatcttttgtgccgtggttgacgctttagatgcctcattcatatcagcaaactttgcaatcgacagattactttgtgcctgatacatataagaaaacatgagaatcgcagcctgaaaaacaccgagttcctcaaatagcttaaccacctcatccttcgacatattacctaagtcatagatcgtcgatgtcgaagaactcgcactcacattaacaacggatgttgcatttgatgtatccatctatatacctcttgataatttttctcaggaaaacaaaaaaattattgagtaattaatatcaaataatttcctccttatagtcgataactttaccaatcattaataatgcattctctctctgctcactatcaataaagcaagcatctggtaatgatgtaaaaaagtctttcaataaatgaaaataanaaatatgtttatcttcgacaatcgatacccgagaaggactctccagcaaccagtcttctgttagccagacatgttcaataatcgataacacttcatttaaaatgatatctttatctttcttaatagagatcgaaataatatctgcatagttatcaagtgataaaaaaatgattaccctgcataaatcactaataattgaagatgtctttactttgtcttcaaaagaagacatataagagagatcgaacgacagcgccctaataatgacttttaagtgcttctcacgctcgggaagatccttaatctccataaaccagtcaagtaaagaggcgccattttcagaatcctcatccttagccttttcataaagcttcttgatcttctggataccttcctgatttaactcacccacccctaaccaggaaagcagagccagctcccaatcatcttcgcctaataaatctaataataacctggcatatttcttttttaattcaatcttaacaaacttagattgcaataaagaagatattagcgcaacaatttccccctttggcatgttgccaaacatcgccaaagtaggatcgtgttgttccagcagcccgctgttttttaatgatagttcttttattttatcactatcggtaagagtaagcagctcttgcatatcattgagcagcttctcgattgtcgagccttcctcttctttccttgcgctacctttgcgatatcccaggcttagcccttcaatcgtttcagaaagcgatgaactagtaatcattgctaattcattttgcaaatttannnntggcgaagaaanattagaagaatttttttgcgttaattgctgagattctaattcaaaatctaatgaattagaattaaaaacagatgcggggttttgattaaattcaataccattagccattggaaactcacgtaatcattaattatgaatattccattaaatagtactgtacaacagcttcctttctactctattcttagacgatgtaagttcaccatattttttctcattgttcaaccaccaggatgaataaaatttaaaaatgttatcctcatataaaataaaacttctcaatggtgcgatgcgtaatcgggaattacaacttccgatgggaaacctaacgctaggtacggaagataacgatattgtttactttccccttgaacaaggcctcaatcagtttttacttgatatacgtgaggaaggtgttttccttttatctccggttgaattttggattgatgggcaacccacgccctatgaagcagataaaccattacctgtcggaaaggttattgatatagcgggatgttgcttcatcattggtgatattgaccattccttgccattgtctgatgtgccagaaaggttctctgccaaaagtcgacgcaaaaaacgccttatcctggcgagcgtgattggtgctacttttgcgttgtctggtgccatcggcagttacgttttgctttccccaaaagctgaacccccaacgtttaccagagctgatgtatatcagcagctaaaagaaaacaaacttcatgcaatcactctggtatggcatgggaaaaatatcgcgctttatgggcgttgcgaatcaaccacggatttaactccattttttaattacctaaaagaaaaaaatattttntattacaataatatcatttgcaataaccaaatcatatccgcaattaatgatgtcttaacggaatacggttacaaagatatcattattacaaaaggtaataagcctggattctttctgttatcgggatacattcccccttcacccaaatggagcgaggttgaaaatctgttactgaatacgccaggagttgcaggatgggaaatacacaacaacagtaacaataaaatcaatgaactggcatcagagtttaaaaagaataaactaataaactatgtcaatattttcaaaaagaatgatgtcatcattgttgcgggggaagtttctcaacagaatgagagtaagatccttgccattataaatgcaatgaacaaaaatagtaacgccaagatactctttcagaacattcagccgtacatttcagcagatattttccccggaaaaatactcagaatcagcggtacgatgaagaatccaacaattgctcttgataatggcaccagcctggggattggtagcattctgaaaggaggctatgtcatagacgcgattgatcctaaagatggtatcaacatctcccgcccagacgaatatatacatattccactgtcgtattaatttcttatcctcttccccctcttcggagggttttttattgtgtggatgttgtgagcatagttgttgcttgatgtgattcagctttggtatcagcgtggttggatcaacctacatgagaaaacgtgaatgtgtctctttgaaagagacctnttaagcagataaaaagaccagtagtagatttgattataagaggttatttcttaagaagaaataattatgccccgactaaaacaatacatattttagccggggtggttatggaattattctacacaaaccgcatagacatttggagtattaacattaaccctaggaagagggttttgtgttattaggttataagtgcttgatactccagaactctgctcactagatgtctgtttaatccaagcagttattgagttcatagaactataatggctatatttatttgcagccccccatgagtcataaatatctgacaataccgtctgtgtggatggtaataaatntttgcaaatggacatagcatcagcataataggcttgcttatccacttttatcatatacgacggtgcttttatagtgtaacttactgtttgcttatcaccagatgtggctttaattacgacactgcctttaccattcaaagtgactttccctgatgcatcgacagtcgcgatactggtattttctgaataccatgaatatgtaccatcaccaccgcttgctttcagtttaaactgaccatattgcagccaaatattaggcaactcgcctctgacattgttaccaataatatcaaccttgttgtcaattttcagttcatcaaaaaaagtgacctcagtcgctttaacctcagccccatcactgactgtcgcactaacagtcgctttaccggcggaactggaagttagtgttatcgtcgcacgaccatcatttcccgtggttgcttgcgtttgagacttaccgttgaacatcccaaagtttgttgagaatgtaacggattgattattaactggctgaccgtttttcataacttttacagtatatttaatagcatccttaccatttgctactgcagttgtcttatcagccttaatctcagtaatgctggccttggtttgatcaaaaaatataaccgcactggcattaagtgctgaagtcatctccgcggttttagcagacacgacgacctgtcctggcgtactcgacttcaacgttacggttgccttaccgttagcatccgttttggcactatttgccccaagagttgcagttcctgaaacaatattaaatgaaacagggacattagcctgagctaccccattctttttcaccgtcgcggtataagtaatggtatcggcgttatccgctttagccgaagtcttatccgccgtaaagtccgttaccccaacctggtcgacaacttgaccattcgacagaacggtaatagtaagctgtacattgttagagctattgccattacggtcataggcgcgagccgtcactttataaatattgctgccaccttgcacataagcaggcaaaatagcctggtagtcttgtgcgctttggcttccgctatgctgaatctgaccgccctgactgcgtaatgcactatcatcccagacgatacgatccagaccgtatttgctcttaacgatcaactgaatcttctgcgtactgtgttcagtaccattaatatcatgcggaatattcagagaaagaatatcctgcttcttgtactccagaataatattgttattacgctgaaccagatcgtaacggctgcctgataatgttcttaactcgttaacatactgtggttcaatttgctgagaccacgatttatcaaactgataacggaactgcattgagtaaaggagatcattttcattacccgtaccatgacggtaatcgatccccatcgtcaccagaggaatcggagtatagtttacaccaacggtcgccgcaccaggattcgactgcagcttatcagaattaaacaaagcaacattatcaccataatactgctcatatatcagcttggcgcctaatgccggatatgacggtagatagccattaaaacggatatcgaagccatttgctgggcgctcatcatagtctttcttattgtatgactcatgccagccgctcatgcggaaatagccgttaacgctacttttgaaatagtctcgccagtattcgccaccaatacctaaacgggtattatcaccagaaaaatcctgatcaatgaagacgttatagcccaacatgtttgcaggaaggaaaaaacgctgacccgcacctaaatttgccgtaaagcgggagtcaatgtaacgcgctccgacctgaccaaatgccagcattttttcggaatcatagaacggtaataagaagtccagtgaactaccgtcaaagttattaccactctgcagattaacctctgccgttccataatgttgtaaccaggcctgcaactgtgacgaagcctggttaccagcgataccaagagcggtatctttcgcgtaatcgccgttcagagatcgcgactgaagctggctaccgagactcgccgcctgttgtgccgcataatttaatgccttgtcatcggtcatgttgcttttggtcacgtccggggacattttagtcagtttattcgtgtgaccagcaacaccacctgcagcaacaagaggtgccgaacctaaaagtggtagtgcactgtattcaaagggaagttttttgagtggcaaaatgatctgctgaccaggcgcggccttcatcatttcgctttcagaactgtataaatgcttattcaacgaccaaatcgtcgataaattaatatcttgcgatttagaaagatcggcaacagtttcaccagttttcaacgtataaaaaaggcgattctgatagctatcatgagttaacagttttgaatccgaacccaatttaaaatnntnnnnnncntttgcaaatgaattctgattaacataaaaaaacaatcctaaaccagcactaagcataatcaatgttttttttagcttatgcttgtgccgggtccgggtataacaaccatgagtaatcatgttatggctccaccacaatgagttagaatgagaaataaattatattaatagatcggattttatcttccggcgtaataatgtttattgtcgcttgaactgatttcctctattttcatatgttcgttttctaatgttattccctgattatgtaataccaaatacaggttttccattgacttaacaacgacttctatttcattctcgagtttttcaggggtagcatcatcgagagggaaacgtaacgctaacaacagcgattgtgctccagcctcatagcacagatatggcccaccattctctgcaaaccataagtttgcattcaaaatctcaagagcgaagttagagttatctgtcgggaatttcccacagacaccataaatcatcatatattcgtcattggcatcagataacgaaatataataaatttcatcaatagcaaaagaacacaatctgttttcattaaatgaaatagatccaataccaattttttcnnnnannttttnnnntaaaagttcagatcttgatgacattgtattttctcttaattaaatttatatttacagaagctcaagagttgcccatcctgcagcaatgttattccctgaaaaattgacgttagttagacttcccccctccctccctctaaataaaatgattatggatatatttagacgaaacgatgggatcccggcgctggtgggttattcgaagtattcacagcgctattactcccccccgttaatcctcccatgtcatggcgtaatccaccacttagcgccagacgcgcataagtgctttgaatccccgcacttggatttcctaataaccgtgcgccgttatcagtagtatcccggggaggatgttgaatggtgctatatacaacagaatctgtattccccatattctgaacagacgtattagaattagaagtcggcacctgcgaatcatgcagcgatgttttaacatcagcatacggattctgcacggtccctatgctggaagtgtcaaagaaagtcgacgaggtgctagccatcgagctacgtctgctctccatggtatcttctgacccaggggtatctacattgccctgtgcaggtgtattatttgcaggcttattctctaccgtacgtgcgcttgtagttgtagttgtagtagttgttgttgttgtttgttctaccggctgattttttcgatgaagcgcagcggtgacggcaacaccaattcccccaccaagaatcaatgcgccactaagaccgtagccagcccccgatgaaactttcagctcctcctggcgtttagcttgttgttcatcatattttttttgcgcctgagcattattttcaatggcttgctgtttggcctcttcgcctgctgctttagcctgctcttctatattcgcaacaacatcatctttcaatacccctgacggaatcgcatttccgagctcatcgatattaactttttgattatctgggttctggaacgcttctttcgttaactgatctcttgtcgcagtttcagttgcacttgcagctgcatcagggtcggtcgtggttgggctatccggctccggcgtcaatgcaagcgcctgtacaatacccgtcgccgccaaccctatcagacctgtagcaacagtccccaacgccaaccaaagtttaggatctgaacgaaggctggaagttgaggttgaggtctgagtttctgtggtgttttccgcaccgctatttgactccctcaactccccaacgccttttgactccccagcacctttggactccccggtccctttgggctctaacagctccagtatcctttggcgggcttccgtgatatctgaagcaacggtgaccatagcatgcccagcaccaccacggcctccagtaaatacaaatttgtctttaccttcaggatcaatggactgcaagcgagcgtactcttgatcacttaaaacaacagaggtctcaacaccattcctctgaccgacagcaatatgtttaccatcttcctgagtttcaactcgaaataccgaagagccaatctgcctgttaagagtatcgagcggaccatgatcatgaagaacttcaaatccatcattcagtgttatctcagacgccgccaggcgcatcggatttacaggaagtccaggaacatcactggcacgattgtcgccagaatcagccatagaattccttacaggcgtaaatagcgcacgagatcccaacggccccgtagagttaatgagctgaccacgcccccctgcaccgtcggtttgtgaaggtaatggaggtgcaggaggaattgaattattcacattgggattatgaccaagattaccaataggcataaatatctcctttttattttatgtaaatagataacaatcctttattttgctattacataataatgtatggtatacagcacgtagtcgataaacggctgaacatgacatcgaccaaataaatcacaatctgatttttgatgcaagaaaataatgtgctaaaaacacacatcgggtaacaaaataaaaataattannnnatataaaagtaaacaccacgtgaaatcttaataaaacatttcataaataaaattgcagcaaacattcacttatattaaaaaacacaaccaaagaaaaccaattaagcaaactataaatcttaattaataannanntttattaagtttctttatcgcgttttttcttacatcaacaaaggccatgctatacaccaggaagcttaatttatacctgacaaggttatccctacaatcgggtatcctgtacatgctctaaaatcgcattctgagtaatcgcttttatctcactgactttgaagccgctaaagttgcgttcaaatatttcttgtgagacttgttctatcatcttcgtctgggtgttaaaacgtgttattggatccactcttttgccgcactgctcatcaactttctgattaaagtatttattggactgcaagaagtgaccaattgatgattgtgccccgttcatatcaagaggttgctgtaacgcattttcaacagctctaaaaatgtgacctttagtctccttactaatgaccgaattattactcctgcaatagtcatccagagttctatttactgttctggatatataagtcgtctgctcctgctggaaccattgttgggtatcgccattacgagtttgtttggctacagcctgcaggagttggttagtcagtttgccatgattaatcacaaagttcgactgcacgggcatgaacctcatacccgtggctcccgtacccgcttgcattgcagctctggtaaccgcaggtttaagcgtctgtgcagtcgcctgaactaacgatctgcctgccattgtcattggactaaacataccataaacctttataaattatatttcgacagtaaaaaaattgcttcccattaaaaaataactttaaagaataattatcttgtatttatatttgaattatcctccggccttatctacaggtagttgcactacatttatcatatgctatcatgaatatgcaacactattcccgtaatcttatatctacgccttattatttgtatcagaactctcggattaattacgtttgagtatatcaacatgaaaagaatggcaggactacaatatgaatgagaaatttcgcacagaccttgcacatacgtttgggatagctcttgaagagcaaactgacgtgctctctttccacgataacgatggccatgaatggatactggagtgtgcatctcaatctgaaattctgtttttttattgttatttattgaatagcgaatcaatacagattaattcaatacttgaaatgaatagcaatcgagaactgctcggtatgtttttcctgtcattaaaagatgacaacattcttttaaatattgcatttcctgcagataaaattgatattacagagtttgctaatttaatggaaaatggttatctattaaagaatgagataattagatccttgtcttccagacctacagattttttaccttgataatttctgcgctggatgggatcatccattccgtttaacatactcttcatcacagggacctctgatttctggccgctaacgtctctgaagattcagcctgtattatctaaaagcaatgtaatatcagttaaaaagcggaaaaactccagaattataactattctggagttaagtcaggaagaaaactcaaatgctaatcataatacgctataagaggaagctcttgttgctatagccctattatcaagacgttcggtagactgtacacgacgtaacaaagaagataatcctctttcagctaagatcccctccaggggagtacgaggaaaccaggttgaagaaagtggagttatatgtctctcatttaattttctttccaaagccttagtcacaccgccagaaaacacgctaaatagcgttgagaaacatccattttccggtgttattctttgtactttgtacacataatcatcttttgggccatctttaataaagtgaacagcatagtctttgcctctaaaagagacaatggtggaatcccctatttctggatatacccgatgatggcgttgttgcattcgggctttaagctgaatttcatctacgatatcttcattgggtatatgaagccttctgttgaacctgttccatgacgcatgttcacttgtcagaaatgtcttgaataccgctcctgataacgacatgatacatctccctatataacgtattcctgattaatcacatactatgctaacagtaaaataaaaatcttcgttgatttttacaatactcccgtatgctatcgtcgtattattgcgtattaactgacaaccaccaaaaagatggtatccatctgaattaataatgtcatcttttttaacattacgcaacatgtgtatatcaatatggactgtaccgatcgcacaataaatgcgattcatgacagtctcattgctaagagcagataacagatccgcagccagaacatccgtgacagataaattattatcactcagatttactgttgctaaaggggtattaataacaatccagcaccttctctcttgactatcatcaacatgatagagtctcagactatcaccaactctcaactctgtaactggataatcagtccacccaggtacgatatagccatcaaaaaaaagagcattagaatgtggaacaaattgccaattatcattaatcagatattgtaaactttgtaccgttgtttcgagtataattacattaagtctgttttctccattattattttctattaccggannnnnnnctttatttagcatcgtaaattgaacatcatcaactgacacatcaccttccggtaaggcagtctgcattacccataagatcatgagttttatcgtatcttccggtatcagccggctttcgctatacgggaataactcttggcaccactgaatgaactgttcttctgatatccagaaacgcccctcatagcccgagtatgtcaacgtgaaacgaataccatgaccgctgacctcacgaaaatatgcatggcaagcatgacctttggacgtaatatagaggcgaccggttccgataactggcaacaacggcaaataaaaatcgttaattttcatattcaattgtgaactcaatggcttcatcaggaaagatttcttttaacttatcgaaaacatagtcttttttatgatataaaaaaacatgatttctattatttgggcttactttaatagacagataaatgattccgttactacatttaattgttaaaacaattcctcgtaatcttccacaaagaatactaaacgagtgctccccttcttcaaagtagcgtcgtcttcggcccgaggagtaaaacaatctcttccataaagaagccattcgtatgaacaacgtatcaggcgatcttttttttatnnnnnnnnnaatatcattaaaactttcttctccttgcggccaatcatctgatggccgaaaagaaacaggctctatcaaatttctttttagagaaactctagtcaaagtaatgttcctttatggcaaaagataatttttctactgatttattaacatgttgcagattctcttttgttcgtttttgtgaatctagcaatgaacgcttttccttcgaaagtgaagattttttctcatacaatcgctgcttttgctcatcaaatgcattgtttttaatctgatatttatacaacgacactttatccaaattcaccagcgatgcacaatatgcctgcttagaggcaatcgactctttaatggattgctcgcagtcatcgagtttaccatccacctcttttatctgagagttaatcttagccattgattctctcaatcggttcgctctgcttttacgaatagataaaattctgtccaacatactcaggcaaccactttgaataggctttcaatcgttttttcgtaactactgatatctttggtgctttgttgtataaagttctgaattaatttcctattttttattgccttatctgcttcaggatcttgccccatcgtgtactcaccaatacgaataagcagctcaacatttttataagttgcaataagctttttgcattctgccgccgcacgcaaatgctccgatgtaacaacgttatgcataacacgactggcacttaaaccaatatcaattgcagggaaatggttttcctctgcaagttctcgggtaagtacgatgtgcccatcaagaatagagcggacttcatcgccaataggatcattaacattatcgctttctaacaacaccgtataaatcgcggttattgaaccttttggcgcaggccccgctcgctctaataatttgggtaacgaagaaaaaacactcggagggaatcccccccttacatcaggttctcccgatgcaagcccaacatcacgtgcggctcgggcataacgagttacagaatccatcattaataatacatttttaccttgatcgcggaagtactctgcaatagtcgtcgccgtaaatgcggctttcatcctttccagcgcggggcggtctgacgttgtgacgaccagtacacatttagaaagcgtggattgaggtaagagcgcgaggaattcatttacttcgcgaccacgttcgccgataagagcaaggacaataatatctgcggatgcgccattacaaatcatccccaaaagcgtacttttaccaacgcctgaaccagcaaaaataccgatacgctgcccaataccgcaagttagtagcccatcaattgccctgacgccaagtataaatggctgatcaataacctgccttaataaaggatctggtggttcagcatacaagctgcgttcaaacggaagatagggggcagcaatattactctccattggtctgcctatgccatcaacaagccgcccaagtagtgcgtctccaacacgaatcttgaactcatctccctgataacttaaccactgaccacagtacatgccggaaacatgctcaaaaggcaacaagaaaacctcatcttcatcaatagcgatcacctcggctaaacgttgactgggttctatcttataaaaggcgccaatacgcgcttttggtaaacgcgccttaataatcgtcccgccgatattgataatcttgccttcatatctggtagacgaatttaatgataatgccggcacagtgctattgagcactttctgaatacgtgggtatttttccaatacagaatcatgctctgaaatcatttaccgttcctaatactttaagttcgatattattcccaacctcctgaaaagagagcacggggactgacgggaacgaaccttcaatcattttcttcacatagcgcctgatatctaaagcggtcagaatgacgccgttccccgttggattcatgatattttttaagaagccaattatctgctcagttcgctccggtgagatattcagatacgaacctgatgacgtttgtctgatcgactctcgtagctcattttcaatatcagagccaataagccaaacgttcagaagtgtaccgctaacgctatagcgacctaaaatatgccgacgcagggcaatacgaacgtattcgcacaagataaccacatccttttcttttgttgaccaaaaaataagcgtctcaaagatagttctcaggtctctaattgagacattttcctctacgagacgttgtaggatgtcaacaattttgctcaaaccaagctggcgctgcagctctttcacaagctcgttatattttctctccatgatgtccatcaaataacgcgtttcttgtacgccgatgaactctttggcattagacaatacaagtttctttagcaaaaacgttatcttatcatttgttgttgcataaacatccatacctgtaaggtgagcgagctgttgattagtcttattcgtcttatatacgatagagttagtcgaaagcttttcctggacaaattcgaatgatatctctgcatgcccagcctcaaaatagacagtatcatctataagagtatctttgtatattgactcttgatagagcaaaaattctattgcgctatcattatttttaaccggattaacaataatcttaggcaatggaattccactttcctcaaagaaattccaacgcatgacctcaatttgctgtgtaatgtctgaactataaatattactacttaagtttaaaatcaatggctcagcgcccggtgagatgttttggctattagacaaatcagctcccatagcatccttattattgccagttccaaatgttcttttcttctgtaatttccaggctatccccaacaggcaaaccgccagaaataagaagaccaatgcaggaaagcccggaataatcgccattacgagcattagtgcggcactgattaaaaaagggcgactattaacagaaacctgttgaacaatatcacctgcaaggttttcttctttttcgctttcaccgggcacacgagtaacaaccacgcccgcggtgacagaaataataagcgcagggatctgggcaaccaaagcatcaccgacagacaatacagaaaacaggctaagtgccgcactaaatggcatgtcaaattgccacataccaatgagcacgccaccaaaaaggttaactaaaacaataatgataccagcaatagcgtccccttttacaaacttcatcgccccgtccattgaaccataaaactggctttccttttgcactcgggagcgaagaacttttgcctcaagcgggtcaataacgcctgcgcgcatatcaccatcaatactcatttgctttcctggcataccatcaagggaaaaacgagcactcacttcagcaacacgctcggccccttttgtaataaccataaattgaacaatggtgataatagtaaaaataaccaggccaacaacaatattaccgccaacaacaaagttaccgaaggagtaaataatgtcacccgcatcgtgatgcagcagaataagtctggttgtactaacactgagcgacaggcgcatcaacgtcgtaatcaacaggattgtggggaaagaagttagttcaagaggattttttatatagattgagagcattaataaaagtaaagctgtcgaaatattaatcgcgataatgatatccaccacaactgttggtagtggaataatcatcatcattacagccataaagaagaagagagccagaataagatcgtgatatgactctgctttnnnnnnnnnntttaagagtttattcatgatgtcatcctgcgaacgcgctcaatgatctgcacatgctgttgaaaagtattcattagaaaaaaaacatcgatattggttaacaaacaacttaagcacaatttattatcgtagacaaaaatatgttcaatcactccctgcgtacgctcaggagcaagggcactaaagaaagagaaaaatgcgttttcgttatactctaaagcaaacgtaacaaaaacattattatcaattatttcaataaaaaaagaaaacccattaaaatcaatttcaacacggttatcaaataaataaaaatcatttcccaataatcttaaaaactcttcaacgtttcttttaactaaaagattcatctgcaggctctgaagtaagtatacgtgtgaatattattgcttgaaaaagcgtattggataatatatacagtatatgtactttatgtacattgcaactatttaaataatataatagttgcctatgggataatttggttatttataaccaggtaaatgtctaaattagacaaaaggagaaagatcaatggaagcagcaaatttaagtccttctggtgcagtaatgccgctggcgacctcactcagtggaaataactcagtggatgagaagacaggagtgattaaaccagaaaatggaacaaatcgcaccgttagagttatagccggattagcacttaccactacggctctggcagctctaggtacaggtattgcagcggcatgctcggagacgagcagcacagaatacttagccctgggtattacttctggcgtactaggtactcttactgcggttggcggtgcattagcgatgaaatatgcctaaccggcccatcgcataaataaaagatagaggtaatggatgtattatgcccttgcctctttcanaaaaagaggctaacagtaaatatgaacaacattaatcaatcggaaaacattaatattcaattaaataaagcgccccaaacaaatttcgttgatgagcatacctcgttagcctcagccccctctgcggcaggtgcggctcagtttcttgatcaattactccctaaaacagcgggagtgtcttctccagaacaagtgttgattgaagaaattaaaaagagacatcttgcaacaatgaacagcgatctcagtttcgatgctctatctgcaggtgggctctcgccagaagacgtgctcaccttacaaaagaatgtgctcaacgcaaacgtcaacgttgatgtcgtatctaagttagcaagcctcctttcaacatcggttacaaaattagtttcgatgcaataaaaatgaaaaaacacattaaaaacctttttttattggctgctatttgtttgacagtggcatgtaaagagcaattgtatacaggattaacagaaaaagaagctaatcagatgcaagcactgttgctatccaatgatgtcaatgtttccaaagaaatggacaaaagtggaaatatgacactcagtgtggaaaaagaggattttgttcgcgcaataacgattttaaataataacggcttcccgaaaaagaaatttgcagatatcgaggttattttcccacctagccagttagtggcatcgccatcacaagaaaatgcaaaaatcaactatctcaaagaacaagacatcgaaaggttgctaagtaaaatacctggtgttatcgattgcagcgtttcattaaatgttaacaataacgaaagtcaaccatcctcagcagccgttttagtcatcagctcgccagaggttaacttagcaccatcggtcattcagataaaaaacctagttaagaatagtgttgacgatctcaaattagaaaatattagtgttgttatcaagtcatcctcaggacaggacgggtaatatgtatgaacaataataatggcatagcaaagaatgattgtgactggctaacggcccttgattttgtaaaggatgtcaacggttcaccaacgcatctcactttttatatctaccaaaaaaatgctttcttgcacgattttggaaactactgggttctatatattgagcttagtggtgattttcgtcaggttccaacagatacatttatcagactctgcaatatcctggccgttagtaacgaatataaacaaatgggtattttcctgtctaataagaagtggtatctttgccaaatttttcataaagataataatcatcgcgcaaacatgtcaaaagcaataatgcaacatactctcgcctctttgctcgataagcaatttgataaactagagcaattatcttcatcggatacaatgatgccgccaacacacttgttttctgatataggacgaattgtgtaatgaaaaaaataagtttttttatttttacagcactattttgctgcagtgcacaagctgccccgtcctctctggaaaaaagattaggcaagagcgaatattttattattactaaaagttctccagtacgtgcaatccttaatgactttgctgctaactacagcattcctgttttcatcagtagttccgtgaatgatgatttctctggcgaaataaaaaatgaaaaacctgtaaaagtactggaaaaactgtccaaactatatcatctcacatggtattatgatgagaacatcttgtatatttataaaacaaatgaaatatcaagaagtataattacaccaacatatctggatattgactcactgctaaaatatctgagtgatacaatctcagtaaacaaaaactcttgcaatgtgagaaaaattacgacatttaactcgattgaagttcggggtgttcctgaatgtataaaatatattacatctttatcagaaagtcttgataaagaggcacagtctaaagccaaaaataaagatgttgttaaggtctttaaactgaactatgcgtcagcgacagatataacatacaaataccgtgaccaaaatgttgtcgtcccaggtgttgtctccattctgaagacaatggcaagtaatggttcacttcccagtaccggtaaaggtgccgtcgagcgaagcggtaacctgtttgataacagtgtaacgatttccgctgatccacgtcttaatgcagttgttgtaaaagaccgcgaaataacgatggatatctatcagcaattaatttctgagcttgatattgaacaaaggcaaattgaaatttctgtctcaattattgatgttgatgcaaacgatcttcagcagctcggcgtaaactggtccggtacgttaaatgcaggacaaggtacgattgcctttaatagctctaccgcacaggctaatatcagctcttctgtgataagtaatgccagtaattttatgattagggtgaatgcgttacaacagaactcgaaagctaaaatactctctcagccttcaattataaccttaaataatatgcaggcgattcttgacaaaaacgtaacgttttatacaaaagtctccggagaaaaggtggcgtctctggaaagtattacaagcggaacattgctgagagtgacaccacgtatacttgatgacagctcgaatagtcttaccggaaaacgtcgggaacgagttcgtttgttacttgatattcaggatggcaatcaatcgactaaccaaagcaatgctcaggatgccagcagcaccttacctgaagtacaaaattcagaaatgacaacagaagcgacattaagtgcaggagaaagtttattacttggcggatttatccaaganaaagaaagttcaagtaaagatggtataccgctgttaagcgacattcctgttattggtagtttattctccagtacggtaaaacaaaaacatagtgttgttcgactctttttaattaaagcaaccccgataaaatctgcatctagcgaataataaatgaggctttatgagcaggaaatttagctctctagaggatatttatgatttctaccaggatggtggcacattagcgtcattaacaaatctgacacaacaagatctcaatgaccttcattcttatgcctatacagcatatcaatctggtgatgttataaccgcaagaaatctattccatttgctcacatatctggaacactggaattatgactacaccttatctctgggcttatgtcatcagcgtttatcaaatcatgaagatgcacaactgtgtttcgcacgctgtgcaactttagttatgcaagatcccagggcatcttattattctggaattagctacttactcgtcggaaataagaaaatggccaagaaagcctttaaggcttgtttaatgtggtgtaatgaaaaagaaaaatacactacatataaagaaaatattaaaaaattgttaggtaatacagagtaaaaactaccatcagctataccaatccccaggctgactggggattttctatcggaaataataaagctgctatagtgaagtgctcccaaagttgagcaccgaccactggtagatttatctacaggtgtggggttattccattaaccaggagtttatgccctgaactatcttctgctgtatttaatatcatttccgtttatgaaacaatcagtatatcttaacttagcattagaaatctgatctttccaatcatctatagctcagagtatatttgtcaggaaatgaccttcaaactttagccgagaaaaaggcttaccctggaaaacaaaacccttaaatatagctttatttttattcttctataaaatatactcaaaaaattacgtctaactctcctttttccgcctcatgatcatttcgttccagatattagactgtcccacaataccattaccaactcggtaggtttttctttttggtccggttgttccaggactttctatcggaaccgcctcaaggttaacatcataaatgaaaatctcaaggcgcttataatgcaaattaccataactaacatatctgacacgaaatgaaattttttcttttcttctcgatatataagttataataaatgatgctctcctcaggtttataccgaatgcttcggcaatatcattgcgagaaatccatttctcctgcaatttacaccaaagagaaaccaagatatacagaggttcaccatcgtaattctttactgagtcaggaattacatagtcgccatttttatttttagattccattttccatattctttttatttgataaataaatcgacataaaaaacatacataaannnnnnnnnnataaacttgtggcattcctgtgtttttaataactaatggttctataaatttggcataaacatcaacaaacaatttttcatttcctcttacatggcaatgtaatgtgagattattatcattactcagtacttttttagggataactaattgataatcttgttcaatgtttagcaccgagggaatttcgtaattatatcgatggacatgaagtatgatgtcctcatcttcagagaggaccccctgatacacagaagcaatatcgccgccagtgatcatatttccatttttaatcagtataccttccccacaggagtcttcattgctaataaatataatgctatagatgccatccttcataatcataactcactcagtttcatactaacctcactcctttcaatttgttctatccataagcaatatcaagaataatggagacctttctttttctccagattgcaatgtaatatatcattaaatatactcatgtttcaacctgctgtttccctggttaacatatgtaatttctgattaataatattgagtaacaacgtaaaaatgaaaaaaataatactgagtatcattctcatttcaaattactgttatgcttccgattgttttgaaattacaggaaaagcatataacatagatccattaatattaaaagcaattgcatggaatgaatcaaaatgcaaaagcggaataaaaagcaaaacaaacaaaaatggaacgtatgatataggtataatgcaaattaattcatctcatttagatttattaagcaaatttaatatatctgaagatgatttattgaatgatgcctgtataaacatatctgttgctggttatatcttagcctctaacataaaatccagagggaatacatgggatgcagttggtgcgtataatgcaggttactttaatacaccaaatgcagtagaactcagaaggcaatacgcaatgaaaatatataaaacatataataaattaaagaataatgagcaaattatcgattaataatcaaggtctatcgcaatacgaatcaattgtgccacaggttcaaaaaagtcttctgttatatattgtcctttatgtatattcttatagagagttcttgctaaaggaatatcttcaatcactggaatatcatagagttcagccagtttaatgatctgtagagctttggcatcttttcctgtttcaataactaaaggtaatggagtctccccaagtttatagtataggcaaatcgcaatgtgagtcgggtttttaacaataacggttgattttttgatgttattagccaaacttccactttgtatctcggaatgaaggcgacggcgctcccctttaatttcagggttaccatcagtatccttggcttctcgtttcacctcatctttactcattttcattttcttcagtccctcatgcttctggaaccagaaatcaaatactgaaaagagtagatatccgaatagcacgcctttccataaaagaaaaacaaaaaaggcaacaacgacaagagcttgatatgcgttcagtcctgtgaaattagcaaactcatttgcatatgaatgccccataaaataaaaaatgagaacaattatcactaacttaaatactgatttaagtagctcaaaaatgctctttacagaaaannnnnttttcaggttattttttacactaatcttctgagccgatggttttattttttcaaccgcaaagatgaatcctatttgtgatacaccagtcgtaacagttccaacaaagacaatcaaagaaattggcaaannannnnnnnnnnnnntatttaataccgcacctaatatttctcgaatggcatacaaaaacggtctatttagcgagtctattgtcgtattaactaatccaactatatcaacaaaaaaactcatgccatataaagaaaaaaatgaaaataagattaatgactgcactgcagccattacctcttcactttttgttacatcgcccttcttttttagatcccttagttttttgggtgtgggcttttctgttttttcactcattaatcatgctcggtaacgatctatcaattatgtcagaatgaatatttgccgtaataaaatcaggaaaaacatgaataactaatagcaatataaagattgctatcaaactttttactggcagtgataatgtgaatacgtttagctgaggtgctgttttgttaagaaacccaaaccccatatcacataagaatataccgataatcatgggaactgaaaatgataacatcagtttaataaatgaatcccatagagaaaacaaaaaatctattaaagcacgattgaatgcaatatcggcttgtaatggtaatatctcgtaggataaatatagcttatctaggatgctttgtatcccaccatgaataacaaagatcacagagataaattggtacaaaataacgccagtgatagaagatgaatcacttatggacgggttaaaaattgaagatattgttgagcctcttagagtatcaataatctgtccagccgcatctattgcccaaaaaagaatagtaaatgataacccaatgaaaaaaccaatacttatttcttttagcgctattcctgtcaactgaaagattccagatggcaatttttccgaaaatgtatagttctctactatgatcggaagcgtaaacgcaatcataattgagttgcgaataaagttactgagtaaaacacctgttgaaaatattggtaggataataaacatccccagcggcctgagtatacaataaaatgatgatactatgaccgtcattatctcattcattagccgttcaccttcggaatcatttcaaatattatcgacgagaagttgatgattgttgttcccatccagtgataagtcagggcaagcgtagcaaacactgctattatttttagcaaaaaaggcaatgtttgatcctgtaactgcgttatagcctggaccagactaataataataccgataacagaggccgctatgactgtaggcaatgagaggataaatattatccagaacgtttgcacacataattgaacaaaatatccagtatccatcaattcaccaccaacagaaattcgaataatttttgccagcctccaacaagaatgaataataagatcttaaaaggaatcgaaattgttactggcgataccatcatcatacccaaggccaataagatattggaaatgatcaaatctatcgcaataaagggtaaatagagcaaaaaacctatcttgaatgcagcttcaagctgccccatcgtgaaagccggtaacagtataaatagagagtctttttttaagatagtttcattacccaattttttttgagctgcacgttcaaaaaactctacattgtctttctctgtatttttttctaaaaaaccgcgatatggtgataatattttctcatcaactttttgaaaaaaatcagagtcggtataattgattggttcctgagaaatattatcatttatctgtaatattatcggagacataataaacattgtcagtatcaaagacactgatgttagcgccatgtttggtggtacctgttgaatgcctaatgcgttcttcaatatccccagtacaatagaaattttcaggaatgaagtaccaataacaacaaatattggcagtaatgataacagaaaaaatacaataattaaaaannnnggctgtgagccaatggtcattaattgagacatatcatcattcctgaataatgctaagataattatctttaaatgaattcaataaaatacttatttgctctaatgggtctaaagttattctaatatattcattttctattatanntnnnntatgcggtgtgtttgcatcattaataagctgtatattgttggcctcgccaggatcaagtttaatgtctgggtttttagtgatcttaatagctccgacaatattgttattagatagagtttcccttacaacttcattaagtaaatcatcccaattaattcttgatgatgtatctaaagaatgtaatgcnttagtcagtgacaaatgaatcttattcattatgtcctgcattaagaccaactcgatagcctggatatctttaacccattttatcgattggttaacctctttatctaattttattttattattttttcgaatcctttctctcattagaatcatttttctggcaattttttttctggattctgtctttaattctttcgatttcctcctcgccctcagtaaatgttcatatgttttttttcgagccagtttgataatatcatcagattgaataatttcctgtaacttatcctctggtatgatatcttctgtaagcactaaatcaatttttatatttttaaattcataaagtttcataaggcaataannnnnnnntaagtctgttaagaaataaatcattnnnnngagttggttttatttctccacttttcggcaaaagatatttgactatggtccataaaggattatcagcaaatagccactccaaatttcctgcaccgtattttattaactcagcacaaaaccgttcttcaccatattctggtttacattgccctccctgccaatagaatgataactgcttcacattttgatatcctatctctctaatcagcgtttctcgatataatcgtgagaaaatataatcagggcattgaatgtcaaataatgcactacttagagcaagcaatcttattttcccaattgactgatataaaaaaccttccttatttatgtcagataattccacaccagaaattttatcatgtatttcctgacgcaatatcttattgagttgattacgagtagaactagtttctcttaaacgccgaaaactgacctgattgacaccggttaaatcacctagccattcatcatgaaccatcatgattggataattaattaatttataatagttatagtctattttnttaaaaattgtcatactatttttctattatttctattccgttgattcattgttgattggcttttagatcttgctggactcagtgtctctattagtttttcaatcttacttagggcagaatcatataattttcgctcttcaccatatgtgtacccctcaattaatttgtttaatttttctgccgcctgaggatctgtttttgctttttcacttaactcattaacgctttcttttacgacatcaaattcggcgattattttttttatcgcctcaatttctgatcttatttttttatctaatagttctttatttcttgtttggctcacaatactcatcctctatttattattaatcctgattcgcattatctctatagtcctaattgccgcatcacacgcaatgagcagttcctttgcttcattgtaggtaactttatccaaagggtgtttcattttttcatggatttcgttctttttgtcgtttattttttcaataaaaacatttgcggcttctttattttttattatttcatcttccagctcagttatcgttatcatttaattatttcatgttaaatatttttcagcggtattatttcttcttcagtgtccttcacaagaaaatcttctttcttcattccattcaacagtgcttctttaagccagcgtggctgtcggcctacgcccgaccaggtctgcccttcttcattgcggtagtaaacacctttcgatgagttccggcgagcgagtccatcatcaggcacattagtatatcccagctcttgtaaggttatattgtaataagtaatctgcttctgaatcgactcaattacactttgaacttcctgctctcgcagtcgctttgcttcctgctgtagaactgcaatttgctctataagctgaatgtatggacttgttgtatgtgaattattttccatattcataataaataatctccncatgctttaatattttaagctattagcgaccttatcaggaaggaccaacaattaatcaaatgatataaattatgtgagataacgtttatctatcaaattaggacacatctatttcatcaaacaaccaccttaaaatgttattattctcttttttctaatgtgtaaaatacattatcattaaatgtcaacaaaaaaatnnnnnnnnnnnnaaatccatttaaaatcaatgatatagaggaaaatcatctcgttaacaaacgactttaataattgcatttccatttagttaagcgtttctctttataagatagatctcattgcataaacaaataaaacagaataaaaaccaagctgaaccgtttcactatactctacttaattcgagttacaggaaggcggcaagcgagtgaatccccaggagcttacataagtaagtgattggggtaagcgaacgcagtcgcagcacatgcaacttgaagtatgacgagtatatatatctattagctgtttcccggacataagctacagccagcactaacctggaacgggtgcattataaaaaggaacaagggacaaatagctgaacagtaaccgcgttagtctcttcccgcataaccgtaccattcgtattaagaagtattgcccatatccattcggcgaaagaggatctgccatacatcaagtcnnnnnnnnnnnnnntcagatcatcgccgtcattaactctgttaaagtcggacaaacgattagcaagatctgtgattcaaaagtgcttagcgctaaggtgggactggttacagattcattaaccctgttctttgtcgcacctatcgatcggtgtaatgccacaacaggtttatgttaatcagaacaatgcgcccctctataaagagaattctttgataaggcaacttgaaaagggaaagctaactgatatcaatgtaccactttagtaatcatcacattatatacaggccaaaataagtttcctgaaagccagtatctctaaatcaatcattaatganntnnnnnnnnnnnnnnntaaaaaattatctaaattctattacttatgtaaataagtacaaccttttcatagacacaaaaactatggctgacgcatcacttgcaatcaattatccatcattagattaatattttcacttatttttcagaagnnnnnaataactttctatgcgtttaaaacacccgctataaatatcttgtatattattgacactatatgatgctatatgatacttgttgccaaattgttcattacaaaccagataggagaatctctcatgataaatggacttaataatgactccgcatctttagttttagatgctgcaatgaaagttaattctgggtttaaaaaaagctgggatgagatgtcatgcgctgaaaagttatttaaagtacttagttttggtttatggaatccaacgtacagtcgtagtgaaagacaatcatttcaagagttgttaaccgttttagagcctgtatatccacttcccaatgaattaggcagagtatctgctcgtttttcagatggttcatccttaagaatttccgtcactaacagcgaacttgttgaagccgagattcgcacagcaaataatgaaaagattactgtgctcctggagtcaaacgaacaaaataggttattacaatctttacccatcgatcgccacatgccatacattcaggttcatcgtgccttatctgagatggacctgactgatactacctcaatgcgcaatctacttggttttacgtcaaaactatcaacaaccttgattcctcataatgctcaaacagatccgctttccgggcctacaccattcagctctatctttatggatacatgtcgaggactcggcaatgcaaagctttcactcaatggtgttgatatacctgcaaatgcacaaaaattgcttcgcgatgcactaggacttaaagacacacattcatcaccaacccggaatgttatagatcatggtatttctcgccatgatgcagagcaaatagcaagagaaagcagcggcagtgataaacagaaagctgaagttgtggaatttttatgccatccagaagcagcaacggccatatgctcggctttctatcaatctttcaatgtgccagccttaacgttgacacatgaaaggatctctaaagccagtgaatacaatgcggaaagatcattagatacacctaacgcttgcattaacatcagtatctctcaatcatcagatggaaacatttatgttaccagccatactggggttctgataatggcgccagaagaccgccccaacgagatgggcatgttgacgaacaggacttcttatgaagtgccgcaaggtgtgaaatgtataatcgatgaaatggtaagtgcgctacaaccaaggtatgccgcatctgaaacgtacttacaaaacacttaaaataaaactttattaatcaaaactaataatagaaaccacacccataattattaacaatttattccgaagttaatcacaattaaacaaagatatttattctgcaaacaatttacagcaaatagagaaaatgaaaagaaaaccattaattgcatttttcattgcgatatttattgcactaaccatattaatattatttccatttaattgtacttacaaaaaatcacctcaagaacactcactttcatttataaaacaattaccaaatacggtgaacttatcatctcttacttataataaagaggatgatttcctgtatgccacccagaatagccctgcacagctacttaaaataaccaaaagtggcgacatcatggacagagccccactgccttttatctctgatgccgaaacaattgaacacatacaagggaacatttttgctgcagtagacgaaaagacttctgaactattcttttttacagttacaaaagatatgcatatctcctttcgaaataaaattcagttagaaaaattcaataaaaagaatagagggtttgaagggctggcatggaaagcagatgatcggatgctgtttgtcgcaaaagaaagacgcccaagtaaaatatttatatatcaactttctccagacctgctgagtgtaaagcaagcaactattccagaggcactaaatgatatacgtgttaacgatatatccggcctggcctttaataatgaaagtctgatgattctgtccgatgaatcgcgtaaattactcaagtttaacctgacagagatgtctttcattgagatgcttgacctgacaaaaggaaatcattctctgaccagtgatttgccccaacctgaaggaattgtaactctgcctgatgaaagcatttatgttgccagtgaacctgatatcctcgcgaaatttgtccctaataagtaagtctgtcactggccttattatttatcgaccaaacctggcaatctcataaagttataaaaatacgagtataatttcacgctaaataaacacattaatagttgaaaaggatatcagttattatcaaccagaatcttactcagtctattagtattatcagacttatattagatcctacaatatatttaatttgtatgcagaatagagtgttcacaccacatctggtatagaaaagcacaggctagcaaaaacctgaataaccccgtacttacggagttattcaggttaaaaatatccataacatcacttctgatttttattgcttacgacggatataatttctctggtcagctactaatatcatcatgctcacgcgtttaatcaaactcgtgtttctcaaacggacatcgcgggacaatcttctgcttctcccggcgcattttttaccaccttcgctacctgcattttgagcggaagatccgcttttttctggcccccgcacatatgcaagtccagttttaaatttatcctttatttcattctgaaacaaactgctcataattttctccagtggaacctgcatctcagggagacatcactacagaatacttccccttatgcactgatttaattttggtcatttagaataacggcctgtaaagtctcaatgcaacagatgggtaacgctattatgaggatcctcgtcagtaaattactggcaaggcactccgataaataagaataggttccgcaacaacgttatatgcaaatacctcacgcttcggctagattatcgccggctctgttgacgaaattatggttgaaatctggatctaccacacgttgttctggctggcgatagggatgttgggtattgcaatgatttgcttgctgtttattaaagatatttagctcaccagtctgggctaagaaaaatcggcgtggcgcaaactgagccatcctcgccatttttgctatcatgcctgcatacataaacgacaaaacagtatgcagagggaaaaatgggttccaccagaaaggggatgctgaacgttctgattgccgccgtgttgtggggaagttcaggggtctgcgcgcaatacatcatggagcaaagccagatgtcgtcgcagtttttgactatgacgcgtttgatattcgccggtttgattctgctgacgctatcatttgttcatggtgataaaatcttttctattattaacaatcacaaagatgccattagcctactgattttttccgtggttggcgcgctaaccgtacagctcacttttttgctaaccatcgaaaaatcgaacgcagccacggcaacggtgctgcaattcctctcaccgactattatcgtcgcctggttctcactggtgcgtaaatcccgcccgggcattctggttttctgcgctattttgacatcgctgatcgggacttttttattggtgacacacggtaatccgacgtcattatcgatctctcctgccgcgttattctggggcattgcctcggcatttactgctgcattctataccacctatccctcaacgctgattgcccgctatggcacgttaccggtcgtcggctggagtatgctcattggcggtctgatcctgctgcccttttatgccggacaagggacaaactttatcgttaacggaagtttgattctggcgtttttttatttggtggtcattggtacgtccctgacatttagtctgtacctgaaaggagcacaattaattggcggtccaaaagccagcattttaagctgtgctgaaccattaagtagcgcgctgctctctttactgttgctggggatcaccttcacattgccggactggctgggaacgctgctgattctgtcatcggtgattttgatttcaatggattcccgccgccgcgccagaaaaataaatcgtccggcgcggcatgagtgagaattaccagccaggcaccgcaccaccgttaaagatggtttctgccgctttagcgacttcgggtgattgataagattgcagaaattccttcacgttttctgcattcttattatcttcccgtgccaccagaatattcacatacggcgaatttttatcttcaataaatacgctgtcgttaaccggagaaagtcctgtttgctggatgtaagtggtgctgataatcgctacatccactttcgggtcgtccagtacacgtggcaactgtgccccttccagctccattatctgcaaatggcgtggattatcggttatatccaacgcggtaggtaataacccttttccctctttcagagtaattagcttctctttttgcagcagtaaaagcgcgcgaccaaggttagtcgggtcgttggggatcgccactgtcgcaccttcttttatttgcgccacggttttgatttttttggaatagcccgccatagggaagacaaacgtatttcccaccgctaccagtttataaccatgcgtctgattatcttgttcaagaaagggtcgatgctggaagacgttcgcatcaagctcgccattatttgtcgcatcgttcggtagcaacgaaccgctaaatcctaccagttcaacatcgaggccatatttctcttttgctacctttttagcgacttctgcgacatcttgttctgcgccattaataacgccaactttaatatgcttttcatcgctgctgctctggtcgcaacctgccagcagaactcctgccagtaataatgcggcccccgcccgtagatgatgtgttgtcagtttcatttttttatccttttattaatgattaccggactatagcggtaaggtcgctgcagtttaaaaaangaaacgctatcgataagaataaaaaggaataaaagtggaatataaagtctggcacttcttactgaccacgcaaacacctttcgtacagcatgatgagagcggcaaaagcaaactacacttatgcttcattcgatgcacatttgcagaaggttgccgctatgaagccaacgatgctactcatgattaccgtattcctgatttttccagccctttctcaggccgagtcgccattcagttctctacagtcggcaaaagagaaaaccacggtattgcaagatttacgtaaaatttgcacgccacaggcgtcattatcagatgaagcgtgggaaaagttaatgttgtcagatgaaaacaataaacaacatatacgcgaggccatcgtggcgatggaacgtaataatcagagcaattattgggaagcgttgggtaaggtagaatgcccggatatgtaagaacggcaacaaccactgaccaacgcttctttacctgatatcaggatttcttcattttcacctttgcagtcaccaacaatgcagtcagcaacatcaatgtgccggacaacatcagcggcgaagtcagaccaatgttatccaacgcataaccgccgattgccgcaccgcaggtattggcaagctgaataacggcaacctgaatagatccagccttttctgcctgatcggccaatgagcgagtgatccacgttgaccaaccaacgggaattaaagcaaaggtcagcccccagataatcgccacaccagtagcaacaattttatcgcttccccacagcgtcagtaccagcgcgctcagggcgagcacaaacggtgcgcccgctaaggccagtttcaccgaacgtttgagaataaacgacgaaagcgatgtcccgacaaagctggcgataccaaaactcagcagcaccagggttaagccatcaacaccgaatcccgccagagtcatatacactgggcgaatataagtgaaaaaagcaaactgtccggcaaacgacataaagatggcgatcatcccggccatcactcccggacgttgtaataagcggaaagtattttgtttctgatgcgaaggttcacctggcagcgaaggcagtgatttgataatccagaaaatacacagcacacccatcgccgccgccgcattaaagacattgcgccaaccgataagctcgcctaaaaaacagcccaacggcgcggcaatcaccagcgcaatagaaaccgcgccgaagatcaccgacagcgccttcggcaccgtacgcggcggcaccagacgcatggtcagcgacgccgacatcgcccagaacccgcccagcgccagccccagacaggcacgaccgattaaaagcaaactgaatgagttagcaaaggaaaccagcaagcaggagagcgtcagcaaaacggcaaacaaaataacaacgtancggcggtcagtggcctgaattgtctgggtaataaacaaactggcaaacattgccacaaaggcggtcacggtcaccgattgcccggcaaccccttccgaaatgcctaaatcctgggccattggcgtcaacaaactgacaggcaaaaactcaacgataatcagacaggcgacgcaaaacgccaccgagaaaacggctgaccagttcggtcgggtgatggcatccgcgccgcggttttcggcaataaattcactcatggtgttacccgtggcatgtttcaggggaaaagccgaccactttaacattgaaatgtgtgacgcatttaacgtttttgcaacttttacggtgttgtgggaaaagctcgaggctgctcgaagaaataaaaatcatagggcaaggtgatatgtattttcgcgattgtgttgggaacaagggataaagtattgcacttggtgatatactttaataacaggacctcaacgatatacgcgtgtttaaaaccaaatggtttgcaagggaagccaggtctcatgcaataacagatgaagagttgtgccgggccattttagaaacagaacaaggtaaagctgatgcacttggcggtggcgtttttaaaaagcgccttcaccaaaatcgtgagcgtgcaattattctggcgaaaggggtaagcaattggttttacacgtttttatatgcaaaacaggatatgtcgaacatcaatagtcaggaactggctgggtttcgtgaaattgcaaagcattatgccttcctgacgaaagcccaactaacagcaatgattaacactaaagaactgacagagatctgctatgactgcaaaaactaaatttaaaagtcctgcatttgaggctattcacagcgcagcggctggattgtccagcgtcaatgctatttctgctgaaacgatgcgtacttttgacaaagcctgcctgaccagcgtgcaagacttacaacctgttgagataaaagcactgcgggaaaaattaaaagtgagtcagcccgtcttcgctcactatctcaataccagcgtttcaactgtacaaaaatgggaaagtggcgctaaacgccccaatggcatttcattaaaactgctcagcattgtgcaaaaacacggggtggaggtgctgctgtaaatagaacgtagataatgcgttcacctactgtcagttccgataccggatgcggcnnnnnngccttatccaccctacaggtcaggcgcggtctgtaggctgataagacgaagcggttttaatgcagccagtgaacgccctcggcaggctgaaagaacgcgttatagcgcatctgaaaagcattaatatcctgcatttcaggttcggtttcgcgcagaaaacccagcgccagcctgacctgagcatcagtaatgggagcggcaaggcgggctttttgtaaaatccgatgccattgcagcaggttctgttcgctaccatcgacaatgacaatttgccagatgagcaacacctgcgcggcgttttgcaggtgcgactcatccggacgatgcaaataacgtaaaaattcgtcaccggctgactttcccatttgatcgaccatcgactccacgggtacgacatcgatattcagccgatcgctgagacggcgaatcgcttttctggccccggatgtcagcacccgaaaaccaaccacaaacactaccgccagcgtggcgagcattatccagatcatgagttctcctgcgtaatcagaactcatgatatctggaaaccctcgccagttactaatccaccagaataatcttcagtgcaaacagagctgcgaccaccaccacacacaggttcagatcgcgccagcgcccggtgcacactttcatgatgcagtacgacataaagccaagtgcaatcccttcggtgatcgagaaagtaaagggcatcatcaccgtggtaacaaacgcaggcaccgattcggtaaaatcatcccagttaacgcgcgccagacttgaggtcatcaacacgccaacaaagattaacgctccggcggttgcgtaaggaggaaccatcgccaccagcggtgagaagaacataaccaacaggaacataacgccgaccacaaccgcagtcagccccgtgcgaccaccgactgccacaccagaagtactttcaatataggcggtaacagacgaggtgccgataaacgcgcccgccaccgaactacgctatcaacatatagcgccttattcatattggggaatttaccgttactatctattaagccagctttatcagttacaccaattaatgttcctgatgaatcaaataggttgatcagcataaaggagaaaatgataccggcgagttcaagtgttaacgcgccgctcaaatctacttcaccaatgacgccgctaatatcaggcggaatggaatagacgccgctaaaatgaacatcaccgaaaaataatccacagcaagacgtcaccacaatagaaacaagcaccgcggcatgaaaatgacgtgatgacaacacggttataataaaaaaccctaaaatacctaacaacacgccgtgagaacttaaatcgccaatcatcaccagagtgtctttattggcgacaataacgccagtattttttaatcccattaaggcgataaataatccgattccgctggtgataccaatacgtaaacttaatggaatgttggagatcatccagtaccggatacgaaatagcgtgagcaaaaatagcccaattgcgccccagaatatcgcgcccatcccggtctgccaggagatacccatcgcccccacgaccacgaacgcaaagaaggcgttcagccccattgccggagccagcgccacgggtaagttagcaaatatccccatcgcaatactgccgataccggcaatcaaacaggtggtaacaaacaccactttcgggtccatttgtgccgtgccgaggatttgcgggttcacaaaaacgatgtacaccatggttaaaaaagtggtcatccccgcaatcaattctgtgcggacggtggtcccatgctgaggtagtttaaataatcgcgaaagcgtccctgattcattactcacgtaatcggtattgtcattattcatttttttgtccattggaggagatttaatcccttgcttttgtaaaacaaatgacaacaacggttcagtgataattatcacatttcaattgcacattaatggatattctttaataatcttgcgacatttctttatgataaataacaatcaaattaataaaatcaaaatgagaaaaatatgaataattccattaaccataaatttcatcacattagccgggcggaataccaggaattgttagccgtttcccgtggcgacgctgttgccgattatattattgataatgtctctattctcgacctgattaatggcggagaaatttccgncccaattgtgattaaagggcgttacattgccggtgttggcgcagaatacactgatgctccggctttgcagcggattgatgcccacggcgcaacggcggtgccagggtttattgatgctcacctgcatattgaatccagcatgatgacgccggtcacctttgaaaccgccaccctgcctcgcggcctgacaactgttatttgcgatcctcatgaaatcgtcaacgtgatgggcgaagccggtttcgcctggtttgcccgctgtgccgaacaggcaaggcaaaaccagtacttacaggtcagctcttgcgtacccgctctggaaggctgcgatgttaacggtgccagttttacccttgaacagatgctcgcctggcgggaccatccgcaggttaccggccttgcagaaatgatggactaccctggcgtaattagcgggcagaatgcgctgctcgataaactggatgcatttcgccacctgacgctggacggtcactgcccgggtttgggtggtaaagaacttaacgcctatattgctgcgggtattgaaaactgccacgaaagttatcagctggaagaaggacgccggaaattacaactcggcatgtcgttgatgatccgcgaagggtccgctgcccgcaatctcaacgcactggcaccgttgatcaacgaatttaacagcccgcaatgcatgctctgtactgatgaccgtaacccgtgggagatcgcccatgaaggacacatcgatgccttaattcgccgcctgatcgaacaacacaatgtgccgctgcatgtggcatatcgcgtcgccagctggtcgacggcgcgccactttggtctgaatcacctcggcttactggcacctggtaagcaggctgatatcgtcctgttgagcgatgcgcgtaaggtcacggtgcagcaggtactggtgaaaggcgaaccgattgacgcgcaaaccttacaggcggaagagtcggcgaaactggcacaatccgctccgccatatggcaacaccattgcccgccagccagtttccgccagcgactttgccctgcaatttacgcccggaaaacgctatcgggtcattgacgtcatccataacgaattgattacgcactcccactccagcgtctacagcgaaaatggttttgagcgcaatgatgtgtgctttattgccgtacttgagcgttacgggcaacgtctggctccggcttgtggtttgctcggcggctttggtctgaatgaaggcgcgctggctgcgacggtcagccatgacagccataatattgtggtgatcggtcgcagtgccgaagagatggcgctagcggtcaatcaggtgattcaggatggcggcgggttgtgcgtggtacgtaacggccaggtccaaagccatctgccgttacccattgccgggctgatgagcaccgacacggcgcagtcgctggcggagcaaattgacgccttgaaagccgccgcccgtgaatgcggtccgttacccgatgagccgtttattcagatggcgtttctttccctgccagtgatccccgcgctgaaactaaccagccaggggctgtttgatggcgagaagtttgccttcaccacgctggaagtcactgaataataaaaaaagcccggcgtcatgccgggcaaaagtcaccagttacgtttatgccactgtcaactgctgaatttttttctcgcggcggattttgcgttcttccatcaccgccactatcgccatcaggcagatacaaccaatcgcggcgatatccagcgcagcgaaggtgcctgcccagccggtaaggccgaatactggcgtcccatcggcaatcattcccagacctaacttggcaaagctgtcaccaatcaggtaagcgaaggtgcctttaataccatcggcagcgccaatcgcttttttaggtacaaagccaacagcagccacaccaatcaacaattgcgggccaaagaccaggaaacccaacgcaaagagagaagccagatagatatattcgttgctggcatgttggtacacaccgagcgtggcgataatcagcgccagcgcgatgcaggccaccaggccacggcgaccgttcgctaggtcagagagccagccccacagcagcgtaccgaccagcgcaccagcttcaaacagcgtaaagccctgaatcgccaccgctttagagagtttcagttcctggaacgcgtacacagttgaccactggtcgataccaatacgcaccacatagaggaaaatgttggcgaagcacagcagccagatcactttgtttttcagcacatactcaacaaagatctgccacttggtcatatcggtagattctgtctctttgtcctcttcgctgatctcctcgccgaacagctcttcagctttgccgaggccataagattccggggagtcgctgccgtaacgcaggccgataaaaccgacaatcagcgcgataatcgacgggaagataaacatgccgatgacatggccatcgaacaggtaatttgcgccgaacagtgccacaccagctgcgcctgcaccgccaaggttgtgagaaatgttccagaaaccgaggaacgtcccgcgtttacnacnnnncgtccatttggtgatggtggagtaactgcacgaacccccggtactctggaaaaagccacttaaggcgtagaaggcaatcatcaggaacaggctaaccgagccgctgcccatactggcgctaaagcccagcatacaaatggcagacaggatcagcatgaacggcaggaattgtttggtgtttttgccgtcggcgtagtaggaaaccagcgttttacccacgccataagtgatggagaaacccaggccgatcatccccagctgcgtcatgctcaacccgtaggtcgaaatcatatcgttctgcgcgatgttaaagttcttgcgaatcaggtacatcgtcaggtagccgataaagaccaccaggtaggattgcatgaacggtttgaaccacattttgcgccgcacttcgagcggaaggtccagggtcggcttgcggacctggtttaagaaagccagcatgggttactcctgaaatgaatacctgcgtgaggcatgcattgtaaaaatcagcagcaantcaggcctgagatagcgtccaggcaaaacctggaaaatttcttagttttgccggatatgaagtgaaaaggtgagatgcatcacgcttcgcgcggtgtctgggcgttcaaaaagggcagtaacagcagtgcggaaatcccggcggcaatggcgataaccacaaaaaatccgctccagtgccaggtatcgagcactttcgccagcggccaaccagcaagcgacgcccccagataagcaaacaagccgacaaaccccgtcgccgcccctgccgcctctttgtgggaacattctgccgccgccatgccgattaacatctgcgggccaaagacaaaaaaaccaatggtgaagaagcaggttgcctgcatcacgtagctggcaaatggcatcagccacagcgagccgactgaaagcaaaattccggcagcgaaaatcaaattcatcggcccgcggttgccgttaaacagtttgtccgagccccaacccgctaccagcgcaccgataaatccgcccagttcaaacatcgtcactgccgtattcgccgtgaccagatcgacgcccagcgtctcggacatatacaaattgccccagtcgttgatcgccgcccgaaccacatagaccagcacatagcaaaacgaaagcagccagatatacggattcaacaacacatacttggtgaggatctctttacgcgtcagccctgccccttcttgttgttgagcaatctccagcgcgtcgtgtcgccattcaccgaccgctggtaaacctaacgcctgcgggcgatcgcgcngccgccagcagagaaaaatccccacgacgatcgccatacaaccagcaatcatcatcccggcacgccagccgtaatgcagcgcagctgctgccatcacaatgggaatgagcgcaccgccaacgttatgcgccgtgttccataatgcccaccaaccaccgcgttcggtacgagaataccaggccgttaacagacgcgcacacaccggtgaaccccagccntggaaaaaggcgttcagcacccagagcacggcaaacgcccatagcgacgtngagaagccaaacagaatgttgatgatgcccgtggcgataagccctattcccataaaataacgggcatttgagcggtcgctgacaatgccggagacaaacttcgacacgccgtaggtaatgtaaaacagggtcgctaacaggccgatatcgctacggctgagcacgccattagcaaggatttctggtacggcggcgttaaaacttttacgcgtgaagtaaaacagcgcgtaacccagccagatggtcagcagaatatgccgacgccagtagcgataacgggcatcaatttcatgtttatcagtcattaatggcgcatcggcaggcgctttcagaaacggcaacatcatcaaaccttagacatagcgttgaggtagagaaacgctgacacgcgtgccgtgcagacaggaaatggtcaaggtgccgcccagcgccgttacgcgctcgcgcattccggtgaggccaaaaccttgttgcccggaacccggcggtaaaccgctgccatcgtcttcaatcaccagcatcaaccgttcatcctgctgccagccttgcagggtgaccgcgctggcatcagcatgtttcacaatgttattcagcccttcctggcagacacgaaacagcgtcacgcgctggttttcgcttaacgctgactcttcgattcgccattcgagatggctgacaatgccgcgcccttccagctccatttcccgcatcagtgagcggatggcctgctccagggtgagatcatccaactggcgcggacgtaaccgccctaacaaacggcgcaccgcgtcgtacacgcccagcgacagttgttcgatgagctgcccgctctgcttcacactggcgttatctgccgccagtcgctggacaatgcccgcttgagtacgaatggcagtgatggtctggccgatatcatcatgcagctcacgcgccacatcacggcgcacgctctcttcagtttctaacaaacgttcagcgagatgctgattgcgcgccagttccttttgcagcgactggttaagttcacgcaaccgctggatgccagcgcccagtaacaaccctgtcagactttgcaccagcagcgagagcaataaatccacaggatgatcgcgccaggtttgactggcgatcagcgcgatggcgttcatcaatgtcgctatcagcgccccttgccagccgtagtgccaggccagcgcgataatcggcagcgccaggcagaatggcgtaaagcgcgacagttcgtccggcaagcccaactggagccagagactgataacaaacagcagcaagtaccagaccagatgccgcccgcgccagttgatcggttgagaaactaacgacggcccgagcggcagccaggtgttattggcgagatagtgccagaacaccagacatatcggggccagcgtcaggccgccagttaaagttaacagcagcgcattccacgactctttgccgtgccaaagccagggcagcgactgcaacaacgccgccgccgttaacgccgcaccctgtaacagcaaggtgcgccagtcacgttgatggcgatagcgcgagatcagcgccacgggcagtaacgtcagtaaactaccgatcatcaataaggagaaatgggttaaaccgaccgcctgcgttagccagtaaatcagcagccantccgntcccagcagcaccggccagtatccgcgcgggcattgcagcattagccctagccgcagaccaaacggaaataacagcaccgccatatcagggcgctcaaccaggtgcaggctgatactccacaggcaaaaccatgcggcagagaagataaaaaagcaggcaataacggtaattaagcgggagaacaacgtcttcatcaccagccatcaaacatacggcgcgccagttcaacgtcgttactgacgcccagtttttccatcagattggcgcgatggacgtgtaccgttttcggtgacaagcccagttcggcggcaatctctttcaccgccattccttgcgccagtttttccgccacctgccgttcacgtttggttagtgggtcctggcgaccggatgccagtttaatggcaatatccggcgtcagataacagccgcctgtggcaaccgtatgcaccgcagcaatcagttcgtcagggctacaacgcttggagagaaagccacgcgcccccgcgttaagcgcctgctcaaccagcgccggactgtcatgaacggagagcataattgtcgccatacctttcggcagctggcttagcagctccagaccggagatatcgggcatggagatatcgcaaatacacacctgcacaccgcgccccggcagccccgccagcgcctcgcgccccgaaccaaactcggcaactacttgcaaatcaggttccagccccagcaactgcgcaaagccggagcggacgatgaggtgatcgtctataagggcaacggtgatcatgattgggtcctggcggataaaaaacgcgcataccttaacgataagcgcgatgttgttcaagttggatatggggtatgtattggcttaatgatgttgagcttatcgtcaaaacgcttacctgagaggtaagcgtttggtgcgtgttattgagaaaaagcgaattatttgtaggttgcaatcgtaatattgcctgagaaatttctccttagattgcggatatcattatcccttgcccaataatcatctttgtgtctataactctcatcggaatgtacatagggagaatcatcttcagcgtcgttatggataatattttcgcctttagtggtatagatataattagcaacatcaaaggtgtcattcgcgttatttacgactgcgcctaagacgcaaagggtttgagtgaatccgtattctgagaaatcgacatgctgatggtaatttctaccattcaaagcaacaaaactcggacaaacatctattgtatcgccaacagacgtagcggcgcgacgcacatcaagtgcagcgttatcgttagcaacatgaaatgcttgtgaacaggcataaaacaaatttctaatcccggtacgactggataaacaagaaataatttttgctattttttctggctttataccatcctgtactaaagaatctctcaccagatcacattcaccaggtgtgaaaacaactttcttgaatatttcctcataaacatcataagaaaaatattcagagagagtgaaagattcggtgggatgtgttaaatctgtaatttttttgctaagtaattcacttatagtgctgtttattttttcaccgcaacataaaacaaatgaacttccctccagaacttgcctttctgcatctacaaggagtgagctaaattcatcctcatgaagcttaagtttttttatacctgattgatgtaaatatttttctggaattaaatctttttgttcccttataagctctatcattcggcgttcggtttgcgtatcaaaagagtatttcatgttatagttatttttagcaacttccagcttaagagcatttgcagcaactgttaattctgagatttgatctttttcaaattgatcgtgatctgataataaccttataaactcttttacatttcgaccactaaaatccatatccctacactttttatcataacactttgtttcgccattgaactcacgatacagatcagtgattttaaatttattacttccggtctgctcaatttttatatagctattcatgcctgtaacggcaatccatgtcttataattcgcattctccgattcaggcgtaacatgaaaataaggaaccaatttatcactaatatcatgccgatagatatgaaatgaatctaaaagatataataaaaaacttcgaaaaatgtcacgaaaagtgtcatctttaaaccttgccctataattatcgagcaggccgctttgttctatcatattaaatttntaaatattatcctcgagacttttgtcgatactctcccttagactctgattttgaaactggctattatcattctctgtttccgttggatatgaataactcgtcacactaaccatagtaacctcgcaatatgacactttgcatattttgacattgttagaagtatcaatggctagcatgataaatatctcaatgctaaccgctatatttcatttatttcaataataagactatagtgccgttaatttttatcgatttccccaatgcaattgcatcactaatactacttattcactatcaaaaatcgctcatnnnntcaaaaagactgtttacacacagacggttaacaatacgtgttcaccttaatgataaacgcgctttatcaagaaaaaatcataaatcagcagttgttgcggcactggaaaatgtannnnnnattttatcgcttttggatttttcttcgtcgacactaccggtagtaaaataacaagagcactgaagcttcacttcatttccaacattattaaccgccatcaaatacatcttctgactaaacccatttatagtaaaatcaatttctttaagatacttcccagtcccaaaaaaggcatttcctgacttttttaaacccgatgttgatgaaatggtaccattcaaactctttgagagtaactcgctaacatcttgagatgtatttcttaaaaaactctgatagccttgcaaaggagaataataaaaacatgtaatcccctgagggctggataagcaagcggttatttcatcaatcttatcatccgtaatattaccgtttgattgttttaataattcccttacctgagcacaatcatcatcattaaagcaaaccagttcaaccatttgttcaagtgtgttttgactattctttggatctttttcaattatttcaattttgtctgtaaatattttaagaatatcttcacttaactcaacaccgcagcaagttattttagtagcacccttttgttgactttgttcttttatagttcaatgagcatccataatcatggaatcaaaaaaaacatcagttcttttaaaactttcctgaacaggtacatacccttcatcttttttaattcgcagttttaataaatcatatatattacttaaaattcctgcaggaatttcgtaattaaaatccgtattcttcataacaatactattaactaatttcttcctcaaaaccgtgtcagcggaatgtgtttctaacgcagaagttttttcagacaacgatttaataatagtcgctacagccactcctgaatatggaatttcttttcgtgaaggtttatctctgccaaccagtgtaatattaaaagacttatcacctgtttgtttgatttcgatatatccatcctctccagttgccgccatccaggtacgattaccattattttccgtgcctggcatagggtggaaatagtcaagaatatcggtgttaatactccgagaaccggacatgatgtttagtattaagcgctttatttcctgcaacatccattttgcgaaattactgccaggtgaatattttttctcgttatttttaatatcaagctcagcagcgacatttctatttttatccaaaaaggtggaagggcagagatttgccatcattattccgctgtttataggacttgccataatatacctcacgatgaaccattaattaatagaatgctggtcatgaccactggtatagacagcaatcagaatttaacaccatcgctggaaattttagccctaactgtcccccccaggttaccggtgctgcgacttaaattaacgtcctgggctaataaattgtgcctgagatggtctctggcacaatttcaccctatatatctgaacggatctatcaaaaatcgctcatcagtaactcccccgagcggtttaatgtcgctccttactgaaaaaacactgcaatcttgttaaacatcgtcggatcggactgattacgctgcactttcaccacatcttccagcttatcgatttggcttatcatctgctccagacgctggtcgtcattgaccagtagccagatatggcttttgtcgctgtcctgaatcggcagacaaagaatgccttcaacgttaaaagcgcggcgggcaaaaaggccacaaacgtgggtcattacgcccggatggttgcgaacggtgagttccagaatcacgttgtcatgagttgtgttttgcatggcttattcccccaccatttctgtattcgccgcacctggcggcaccatcgggtacactttttcttcggcatcaatgcgcacatggatcagcgccggaccagggcgattgatgatttcctgcaatgcagcctgcggatcggcttcgttattcaaatcacaggtttcgaggccgaatccggcggcaatctgcataaagttgatttttcccggataggtagcggcaaaaacgccctgcttgtagaacagactctgttgctgatgcaccagccccagcgcttcgttgttcatcagaatgattttaacatccagctggttttcgctggcggtcgccatctcctgaatattcatcatcaggctgccatcgccggagaaacacaacactttgcgatccgggttcgccagcgccgcgccaatcgccgcaggcaggccaaaacccatcgtgcccagcccgccggaggtcagccactggcgtgggcgattgagcggataagcctgcgccgtccacatctgatgctgacccacatcggtggtgataatcgcattgtcatcgacacaggcggcaacggcgttgatcaggccgtaatggcttaacggatcgcacgctttcgggattggacacgggaattcgcgctgcnaatccgctaccaactggtgccactctgcacgcggttgcgcttccacctgcgggatcagctgcgccagcacgtcatcaacatccgcctgaatcgctacgtgcggctgcttgattttacccagctctgcgcggtcgatatcganatgaataattttggcattcgggcagaactgctcggttttgccaatcgcccggtcatcaaaacgcgcaccgagcacaatcaacaaatccgcctcctgcaaaatanagttggtgctgcgcacaccgtgcatccccaacatacccagcgacaacggatgcgcttttggcaacatgcccagcgccattaaagtcattgtggtaggcagctgcgctttctccgccagttcacgcactctcgcaggcgcattgatcacaccaccgcccagataaagcaccgggcgtttggcagcattaatcattgccgctgcgtcacgaatgctttcttcgctaaaggcgggcgcgacggctttttctgccaccgcgggctgtgcttcaatctcaaaaacggccgtttgcacatccttaggaatgtctatccacaccgggccagggcggcctgattgcgcaatacggaaggcatcgctcatgacctgcgggagttcttcgatatgtctgaccagatagttgtgtttggtgatggggatagagatgccgtaggtgtcgacttcctggaaggcgtcagtgccgatcattgaggcgggaacctgaccagtgatgcaaatcagcgggatggagtccagccgcgcatcagcaatggcggtcaccaggttagtcgcccccggtccgctacaggccatacagaccgccggtttaccgtcggtgcgcgccattccctgagcgataaaccccgcgccctgttcatggcgagccagaatatggcggatttgcgtgctttggcttaaggcatcgtaaacaggcaggatagaaccgcccggaatgcccgtcacaatcttaatgccctgctgttccaggaaatgaacgataaattctgcgccggtaaagcgcttacgcgtcgatgatgtgcccgaacttgccatgctccagtccttttcttctgggccgactttccgggaggtgcttaaacgaaaaaccccgcccggtttgcgccggcggggttttggaatcgtgtgttgttccagtccctacggcgcattgccgacgaccaccaccacacgcacgacgaccactgcggcggatggcgcagttggtagtagttttgcgttgagcatggaagtagtcattggggaccttgttggttttgtgtttaacaatatttatacaagcacagctttacaggggagacaatnnnnnatttttcagcaagggaaaattgaggggttgatcacgttttgtactgtactgcaggtaacaaaaaaccccgccggagcgaggtttcgtcagccgcccgcggctggtaaccgcaaagcacactgtattatgtcaacacagaaagtatacgtgttccgcgcaaaacgcgcaatttcggcacgnattttgacgtatttagtgcatagttgagtatcgatcacagtttgcgttttgtccaaatattactgtttatttatacagcaagcttctataatatcactgtacgcaatgtgttatgcgggggccgcatcgttacccggcgcactaagtcctggctgaaacgggtggtgccgtcagcgccttaaccccgcgtgagcacactgtgttatgtcaacgagcacaacgtttctccttgagataccgcgtgcacaacagctggcaacaggcagcggaaaggtacgtcagctggcagtgctcctgaaccacaggagacgcgtatgagcctggtggatatcgccattcttatcctcaaactcattgttgcagcactgcaactgcttgatgctgttctgaaatacctgaagtaattcagattcaagtcgcactaaaggggagcgggtaaccgctcccattttatatttagcgtgtgggttggtgtcggatgcgatgctgacgcatcttatccgacctaccatccctcccggcaacatttattgccgcttttgtttacatattctgccgctaaacaattccccattcctggcgtatatctggctaacatttatcaatgtgatagattcctctcccgcatttatgggaatgcgtagtgacttattctaattatttttataaaagcatccgtgataatgaaaaggcatagaaacatcaatttgttattgatgttggtattactcgtggccgtcggtcagatggcgcaaaccatttatattccagctattgccgatatggcgcgcgatctcaacgttcgtgaaggggcggtgcagagcgtaatgggcgcttatctgctgacttacggtgtctcacagctgttttatggcccgatttccgaccgtgtgggtcgccgaccggtgatcctcgtcggaatgtccatttttatgctggcaacgctggtcgcggtcacgacctccagtttgacagtattgattgccgccagcgcgatgcaggggatgggcaccggcgttggcggcgtaatggcgcgtactttgccgcgtgatttatatgaacggacacagttgcgccacgctaacagcctgttaaacatgggaattcttgtcagtccgttgctcgcaccgctaatcggcggtctgctggatacgatgtggaactggcgcgcctgttatctctttttgttggtactttgtgccggtgtgaccttcagtatggcccgctggatgccggaaacgcgtccggtcgacgcaccgcgcacgcgcctgcttaccagttataaaacgcttttcggtaacagcggttttaactgttatttgctgatgctgattggcggtctggccgggattgccgcctttgaagcctgctccggcgtgctgatgggcgcggtgttagggctgagcagtatgacggtcagtattttgtttattctgccgattccggcggcattttttggggcatggtttgccggacgtcctaataaacgcttctcaacgttgatgtggcagtcggttatctgctgcctgctggctggcttactgatgtggatccccgactggtttggcgtgatgaatgtctggacgctgctcgttcccgccgcgctgttctttttcggtgccgggatgctgtttccgctggcgaccagcggcgcgatggagccgttccctttcctggcgggcacggctggcgcgctggtcggcggtctacaaaacattggttccggcgtgctggcgtcgctctctgcgatgttgccgcaaaccggtcagggcagcctggggttgttgatgaccttaatgggattgttgatcgtgctgtgctggctaccgctggcgacgcggatgtcgcatcaggggcagcccgtttaagctcacgtcaccgcagcatcgtcatcagctccatgggagaacgatgctgctttatcagatcacgcatcacccgcatatgcggcgcagagtaagaataaaacgcctgatagcccgcacaaagcacgctgtctggcgtctcctcccgagcgtgcggacacagcagatgccagtcgcacgccnnnnagccacggcgcggttgcgggttttcgctgccacaccatttttgtaatgtggcgtcaaaaagctcaatcgagatacgactgatatctgcccgcacccaacactcaaacagggcaattaaaaatttcccccacagctctgctgtcaccgaagcggccgtcatatcgccccggtcatcaaattcaagatggggaataagctgtacggagcggatgccccgttgtttgaaattgtgataaaaatcggcaggttgcagagcatccttgtactctacaaccagtttatgcctgtcctcttcagcatcaatgacctgacttcctgtcatgcgactctctcaataaatacgataagttgatgtatatgcgttacagcaaacagtattgcgagagataacaccgcgagggagatcaaaaatttgtcacggactacgtgaaattgggaaaaatcgctattcgtgacatccattaaattgcgattacgagtgtagtgccagaggatcagcgccacgatggcgaggatgccaatcgaaatccagaataacatgcccgcctggtgccagttgtgtttgatagccaacgccatcaacgcgccgtagcccagcatggtacgaaaccacgccagtgatgtacgctccggctgcagccctgggtcggcaatgcgtctggctttgcggctatccggcatacaacaccagtcccataacgatcactgctacgaccatcaatattaagctgatgattaataagctgttggtgtagggcaggtcctctttcagacgcatcgctttttcattgcgtaaccagcgcaagtagccatacatcgctaacccgccggaaaacagacacaacaacaacgccagcagttcgcgaatgacgggcgtggcgaaatctggcgcaagttgatcaagcccaacccccgccgccagaaatcctagtgcagtacggatccacgccagaaaagtacgctcattagccagcgagaagcggtaatcaggcgcttctccgaggcgggaaattttcattgttgctcctttgcaatttcactaacgctctacctttagcggttttttttaagaatttcgtccgcccgtttcctgatatgcttttgccatccgctacaaggaggtcagatgggtatcatagcgcaaaataaaatcagttcattgggcatgctattcggtgccatcgctttaatgatggggattatccacttttcattcggccctttttccgcaccaccgccaacgcttgaaagcatcgtggcggacaaaacggctgaaattaaaagaggtcttctcgccggaataaaaggcgaaaaaattaccaccgtggagagaaaagaggacgtggatgtcgataaaatcctcgatcaaagcggtatcgcactggccattgctgcgctactttgcgcatttattggcggtatgcgtaaggaaaatcgctggggcattcgcggcgcgcnggtttttggcggcgggacgctggctttccataccttgctttttggtatcggcatcgtgtgcagcattttgctgatattccttatcttttccttcctgactggcggttcactggtttaagcagcctgaataatgcccgccgggtgttcatcagcgggcattatcgtcagaacttctgttttttctcttccaccttcaccccttgtgtcggcaggccggtgtcatagtcgcgtaccactggcgaataaccatcttgtgggcgtggacgaaatgcccccatccagcgcggctgtgcatctttacgccacggacgcaggctccattggtaactgcggaacggatcgcgaattttgtccatataatccaataaggcatcatgcattttgctgcgaacgtcggcaaaatgggcatcatcgatcaggttatgcatttcatttggatcattacggcgatcgtaaagttcatcactggtgaagaggttgagcaccagtttaaagtcatccgtcacccagcaacgcaccggaataaaaccgccaaagctgtcatgctcaatctcgtagcggttaaattccaccatcacgccgcgtggctctttcactgcaaggatattttcccccggcagaatctctggtttttcaatatctgccagcgccatcattgtcggcagtaaatcgatatgactgactggcgtatcgacctgtcgccgctccccttgcggcgaacggatgatcagcggaatgcgggtgatgtcgtcatacatcgccgcccctttactgatcagcttatgtgcgcccatcatttcgccgtgatcggaggtataaataacccacgtattttcacgttgctctggctttaaggcattgatgacccgtccgatttggtcatcaacaaagtcattacaggcaaaatagagcggatggtgataaagcccgtcatcaccgactggcgatggcatcgcctgcgcccataagcggtgatgttctggtttgttcgccaggtcatcctgtgctttctcgcccagctcgtagtaaaaatcagcgtatttctctaaatactccaccggacaggtgaacgggtgatgcggctcatcatacgaaaccaccatcaggaagggttcctcggcgcgcgcgggctgttgcagaaaatccaccgctcgattgctgatgcggtgcgcccaggtgaaggtttcgtcaatatggttcgcctgtaaatcttcgacgctgtttaggccattgcgccacaggctaatctctttttccgtcagttcgctaagatagttcgccccatcgaaccagtaatcagcgtcccactccggcggacactcgccagtgccgaaatagtcatgaccgtcgagatgccatttgccgatgtaacaggtgtgatagccggcatccttaaagtagcgccccatagtggagatgtttttacccggcgcgacgttgttggtccacggcccggactggttagcgtagataccggtaaacagcccggcgcgcnccggtgtacaaaccggtgaacaggtgtaggcggaattaaagcgaataccttccgccgccagactatcaatattttgcgtattcagcggtttaccgctatagcaaccgaccatattgggggcctgggtatcggtcatgatgaacagaaaattggggcgtttcataggctatccttcgcgtcgggagtaaaggttacggctgggtcgtgacgatgccgccagctgtcaaaaatcaggtagacaatcactacggcggcaatgaaataactgatcatcgctaaccagcgcgtaccgtagccgccgaattcagccagcccggcatagacgccaatcatcgcgaacaggatgccaattgacgcgatcttgacgtttttccacggtttcatgtccaccgcaaacgcatctttgaaggtgaacggcgtggcgcgcggtttgataaaaccgatcaccagcatcacgaccacgttgatgcagaacgtacaggccagcacatagaggaaatggaagtcgaacttcaccagatagttgatggtgatgtagctgattatgccaatccccatcgccacttttgccgccagcgccgggatgcgcaggaagaaaaagcccataatgatgatggtaaccagcggcacgttgtaaatgccgttgagctgtttcatccagctatacagcccctgcggcgcgttggcgatccacggcgctaccagcaccgaaacgatagcgataaagaaaccaaatttgcgcccgacggtgaccagctgctgcggctcggcattctggttaatgatgcgacggtaaatacccatantgaataacgtactggcgctattcagaaagccgttgaaggtactgatcactgcaccaaataacaccgcgccgaagaaacccaccagtggcactggcagaacgttattgaccagcgtcgggtaggccatgtcggctttcggtagatcctgatacagatgaaacgcaatcaaccctggcagcaccagtaccagcgggtcgagcattttcagcaccgccgttaacagcgcccccttttgcccttccgccaggctttttgacgccagcgtgcgttgcacgatgccctgatttgtacaccagtaaaaggtgttcaccagaattaaaccggtaaatgccgcgccaatcggcaagggatcggtcgggccaccgactgagtttaatttctcggcgtgaacggtggtaatttgctcaatgccctgcataaagctgcccttgcccatcgcgatcaagccaaataccggcaccatcaacccgccgataaccagcccaataccgttgatggagtccgccactgccattgcgcgcagtccgccgatcaccgcatacaaaattcccgccagaccaagcaaaattaccagtagccagatagccgcaccgtgagaaatctgtagcgattccccgacgtgaaacaggctgttgagcgccaacgcgccggagtagagaacaatcggcagaaagcagacgccggtggcaatgaggaagcagaagtcgatgataatacgcgtcgttttatcataacgttcctccagaaaatcggggatggtggcaatgccgcgcttcagatagcgcggtaaaaagattagcgcgaggaagatcagcgtcaccgctgaagtcacttcccagcccatcaccgacatgccgcttttgtaggcctgcccggaaagaccaaccagttgttccgtggaaaggttggttaacattaacgaagcggcaataaccggcgcttttagtgaacgtccggcaagaaaatagccttgttgcgatccggtatctgttttgcgaaccttccaccaggtgatgatcgccaccagcagcgtaaaaccgacaaaactcaagatttgtaacgaattcatctcatagcccttatttatgtttatgtcccggacgcatgaatatagggagaggtaaaatgcgtcgggtcaggcagtcagattcttaaaatacaaacgtcgtatccctgaacggattgttttctgttaagttcaggttgtgagcataattcgccggagggatattaaaatgaatggaaaattgcaaacttcagatgtaaaaaacgaaactccatacaatattcctttattgattaacgaaaatgtgatctccagcggaatttctctgatctcgctctggcatacctacgccgacgagcattaccgggtgatctggccacgggacaagaagaaaccgcttatcgccaactcatgggttgcggtgtataccgtacaaggatgtgggaagattcttttaaagaatggcgaacaaataacactgcatggcaactgtattatatttttaaagccaatggatattcactcttatcactgtgaaggtttagtctgggaacaatactggatggaatttacccccaccagtatgatggatattcccatcggtcagcaaagcgttatttacaatggcgaaatttataatcaggaactcaccgaagttgctgagttaataacttcaccagaagcaataaaaaataatctggcagtcgcttttctgacgaaaattatttatcagtggatttgtcttatgtacgcagacggtaaaaaagatccacaacggcggcaaattgaaaaattaattgccactttacatgccagtctgcaacaacgctggagcgtagccgatatggctgccacgatcccctgtagcgaagcctggttgcgtcgtctgtttttacgctataccggaaagacaccgaaagaatattacctcgatgcgcgtctggatctggcgctatcgctattaaagcaacaaggaaactcggttggcgaagtcgctgatacgctcaacttcttcgactcctttcatttcagcaaagcctttaaacataaatttggttatgcgccttcagccgtgctaaagaatacggaccagcacccaacggatgccagtccacacaattaacgtaactctggccagtacgctttgttggcctccagcaactcatccagaatagctttggcgaccgaggcgctcggtaccgttttcgacaacgtaatcgcctgccacaggtgctgatatgaacgctgttcccaggcgtccacgaccagtttttccaccgccacttgctgactcattaaccctttctgaaactgcgggatatcgccgaccaccagtggttctggtccgttgtgcccgaccagacacgggatctcgaccatagcttcatcatcaaagttatggattgccccgttgttaggcacaatcagcaacatccgctcctgagtgttgaaggcaattgccgccgccagatcgacgatgtatgacgcatgttcgtcaatttccagcttgcccgccgctgaatttcctgccgccgtaatggcgcggcaagcatcgaaaacctgtttctcgcgatgttccattacctcattcgcgcgagtatgttcagggttggaatgctgaacgacataatccgggaagagataatatttcagataggtgttcggcaatgtatccgggtccagtgcctggacatcccgcgcttttgcataggtgtcgttccagctcgcttcagtatgtgtatcttgctgcggtggaacataaccgtgcttagagacatattgccgcagctggtgcatcaggtcgttgccctgcaaatcttcaattgatgtccaccagccaaagtggttcaggccgtagtagcgcacgcgcatctgtttgcgatcttgcagcccaacaatttgcgccatccggctttcaataccgattggcatgtcacagatgttgaggattttcgcattcgggcgcagacgacgcgtggcttctgcaacaattgctgccgggttggagtagttgagcatccaggcgtttggtgaatatttttccatataatccaccagttccaggacgccgccaatggaacgcatgccgtacgctattccgccgggtccgcaagtttcctgaccaacaacgccgtggcgcagcgggattttttcatccagttcgcgcatcgggtatttgccgacgcggatgtgcgccatgacaaaatcaacgtcgctgaacgccacttcaggatcggtggtgtaactaaacgcaatatccggcgctttttctttaaggatgactttacaggcttcggcaatcacttcctgccgcgaaccatcgttatcataaaatttcagtgcacgaagcgggaaacggtcctgattcgccaggagcatcaacacgatgcctggcgtaaaggtgcttccaccgcctgcgacaaccactgagaatttggtcattatactgcctccgtaatggcaacattttctgctgattgatgagaattaattaagctatcgagctgttcacgcagctgggatacatgcagaccaatgatcacctgaatggcatcgccactacggaagacgccgtgcgctcccagctttttaaagacttcgtcatccagcgtttgtgacatgtcatgcagtgcaatgcgtagacgcgtcgcacaattgttaatgctggagatattgccgaccccgcccagggcttgcaggataccggcagcctgatccagctctttttttggctctgccgcggtggtttggcctcgcgaggctttgtattcggcttttgagtagagtttcacttccgcatcttcacgtcccggcgtgcacatgttgaattgcagaatcagggtgcggaaaaccacgaagtacagcagggtaaagcacaacccaatggcgatttgggtcagcatcatatccgcgtggttgctgaacatcgggatccagttttgcggtaaaacctggtcaatcagacctccgcccatgttgcccaccacaccaaagagatacatcacggtcgacattgaggccgcaagcacagcgtgtaccgcaaacagcaacggtgaaatgaacaggaaggtaaattccagcggttcggtaattcccaccagcatggcggttaaggttgcgggaatcagcaaacccgccacttttacccgattttccggtgcggcagtgaagtacatcgctaaagaaatgcccacggcaccaaagatttttgagttaccgtgcagggcaaaaccgccttccgggaacaacgatttcagcggctcggcgctcaaactgaactcttgcagatgctgcgcccagtacatctgaattccgccttcaacagctgccggaccaaagataaacggtccgtagatgaagtggtgtaaaccggttgggatcagaatacgttcgaggaaggtgtaaacccacaccccaagcgcacccgccgaacgcaggaacgcttgcagagattcaatccccatttgtacttttggccagccgagcaatgtcagccaggcacaggggatcatcaccaggaaggcgataatcaccacataagacgtcccctggaaaatgccgagaaaaaccggcagttttttatcgaacagacggttatgcagcgccgtcacaatgccggaaatgataattgcgccgataatgctggtatcgagggttttaatcccggccatcattgtcagaccgctacctgccaccgcgtcctgagtgaaatcgacgccgaagtagcttctccaggtcattcccatcgcattgatgaaatagttccaggtcaggaaactcaccatcaccgccagacaagcacgcccctgcgcttgcttagcaaggccaatgggtaaaccgacagcaaaaatcagcggcatattacggaataccgtccaaccgccctcttcaataatgtgtacgatttgcgcgaataaactgttcggatcggtcagtgattccccgacaaacatcgggttttgcagcaagatggcaagacccaccacaatcccggcgaagggaaacagcagcactggcgtgaacatcgcgccgccaaagcgttgaatttgactgagcatttccacatcctcttttctcaattctgtaagtaggaagcctgattggttatgcggcaggcctggagcgaggataggaagatgcgatcggcagaacatgacgacccaatgggattcgtgatcgctttcatgcttttcgttgggcggtagagatctactttttcnnnnaaaagtagatctctgtgagcactggtacacagcatcgaacacatctttaaaaaanngatgttttttcaattgattaagcagaacttgtgggcgcattacccgggcttgcaggcaaaaaagagatctagagatgatctacaaaagcattgcggagcggttaagaattcgacttaattccgcggatttcacgctaaacagccttcttcccggtgaaaaaaagctggcggaagagtttgcggtatcgcggatgaccatccgtaaagcgattgacctgctggtagcgtgggggctggtggtccgccgccacggcagcggcacttacctggtgcgcaaagatgtgctgcatcaaaccgccagcctgaccgggctggtggaggtgttaaaacggcagggaaaaacagtcaccagccaggtgctgatttttgaaatcatgcctgcgcctccggcaattgccagccagttgcggattcaaatcaacgagcagatctacttctcccgtcgcgttcgttttgtggaagggaaaccgctgatgctggaagacagctatatgccggtaaaactgttccgtaacctttcgctgcaacatctggaagggtcgaagtttgaatatattgaacaagagtgcgggattttgattggcggtaattatgaaagcctgacgccggtgctcgccgatagactgctggcgcggcaaatgaaggtagcggaacacacgccactgctgcggatcacctcgttgtcatatagcgagagcggggagtttttgaattattcagtgatgttcagaaatgccagcgaataccaggtggagtaccatttacggcgactccacccggacaagagttaaccgatactccagaagagcaccgccagtaattggggggtgataatgcgcaggaacatcactaacggatanacagtggcgtaagagagcgccgccgcaccgctggttggatgaagattattagcaaacgccagcgccggaggatcggtcatggaacctgccagcatcccgcacatggtcaggtaattcattttggctaacatccgcgccagaatgccaacagtaatcagcggaacggcggtgatcagggcaccataaccaatccagcttagccnttcgccattgaccagggtattcacaaaatccccaccagatttcagaccaacgaccgagaggaacagcacgatccccagttcccgcagcgcgaggttggcactnggcggcataaaccagtacagcttgccgatactgccgatacgcccgaggatcaacgccataatcagcggaccgcccgccagccccagtttcaacgcggccgggaatcctggcacaaagacgggaatagaacctaacaatacgccaagcccgatgccaataaacactggcagcatctgaacctgttgcagtttttgctgcgcattccccagcacattggcaacggcatcaattgcggacggacgccccaccaggttgaggatatcgccgaactgcaggctgatatcgccactggcgaccagttcgaccccggcacggttcaggcgcgagataacaacgtcatagcgttctttaaaatgcaggtcgcgaatacgcttaccaagcacgttttcattggtgaccaccacacgctcgacgcgcaaatcagtgcctttcgtggacagcgaagtatcgacctcctgaccaatcaccagttgcgcattatgtaaatccgctggctgacccaccagatgcagcaaatcgcccagttggataatggtatctggcgaaggaacttttagggtttcttcgcgtttcagacgcgagcagataattttgtcgccgttgagaatcggtacatctttaatggctaaatcatgcaggttagggttctcaacgcgaatattgatagtcttgatcagcgcgccgccattggtgcgtgaagactcgtgctgctgggcttctgtctcgacattgacgcggaaaataacccgcaacatccacatggtgaacaatatcccgcaaatgccgaatggatacgccatcgcgtaactcatccccatctgatcgaccatttccattggtgtacccaggtcgcgcaaaatctgctgccctgcccccagcgctggcgtattggttaccgcaccggagaaaatccccagcactaccggcagtggaatatcaaacagtttatgcaggatggcggtaaccagaccaccgatgatgacgatcagaacagcaaacaggttgaggcgtaatccggagacgcgcaatgaggcaaagaagcccggccctacctgaatcccgatggtataaacgaacaggatcaggccaaattcctgaataacatgcagcatatcgctacttaatgtcatccccgcctgagaaacaaaatggccgacgatgatcccaccaaacagcacgccgccaatacctaatcctatgccgcgaaatttgacgttgccgataaacaaaccgacgactgccaccaaagccaaaatactgaccgttaatgctatatcactcatcgtccatttctcttgagataacattttaattgctacggattatggctgaatcggtgaagcagatttgccttatagcgcacattatcacgggaaagaacgtgccgaaatatcttaaacagtcgaaatttaacgcattgttgaagaagaaagacaaaaaaagccccaccagaatggcggggcaaagagaatagctagttagctatttaacgcgggacgttcgctgatagcgatacgctgcgctgcgatgggttcaggctcattacgaattaaatcaatatgcagtaaaccgtttacgaaggttgcgccagagacttccatattttcagccagcgtaaagctcaggctaaatggctgattcataagcccttgatgcagccattttttctcttcttttggctgctccggcgtgccttttacgctcaggcgcgtaccttccagttgaatctctaaatcttcctgacggaaacctgccagcgcaagggtaatgcggtagtggttatcgtcgcttttctcaatgttgtacggcgggaagctctgactttcaccggcgttttgcagtgcgttggccagtttgtcaaaaccgatccattgacgcatcagtggggataaatcgaagttacgcatagtcatttctccttctaagaagcgagtaagtacctgcaaatccgaagattcgcatatgctccctgacggcgagcatggagatgtcaggccgcgcaaggcggccttaggaaattagttgatttcgatacggcgcggttttttcgcttccggaatcacgcgttcgagatcgatatacagcaaaccatttactaggttagcaccacgaacatgaatgttctcagctaactggaatttgcgttcaaagttgcgttcagcgataccctggtacagataggtgcgctctttttgttcgtcggcgtgagcacctttcaccaccagcagattatcctgggcggtaatttccagttcgctctcagcaaaaccagccacagcgatagcaatgcggtaatggttttcgtctaccagttcaacgttatacggagggtagccgccattactctggctctggttgttttctaagtggttaaacaaacggtcaaatccaatagcagaacggtaaagcggggataaatcaaagttacgcataatcaatagctcctgaaatcagcgagaatgtaagaccttccacaatggacaggtcaggtagccagaacacccatcaggcgcgtcctcatcggctacgatgtaaaaatgggtctggaaatgaacttttcaagccttatcagcggacttttttttgcagtttatggtctattgcatagactgagggggcagcacgaaacgttaaagtgcgatagccgccacagagcgacgtaatgatgatgttattttcagcaagggatcgctataactcatcaggccaacacccacgatcaacagatgaatttattatgataagaaatgtgttgttagcgttcatgatatgcagcggaatggcattactcggaggatgctccagcgtgatgtcccataccggagggaaagaaggaacgtatcccggcacccgcgccagcgccaccatgattggcgatgatgaaaccaactggggcactaagtcgctggcgattctcgatatgccgtttaccgctgtgatggacacgcttttattaccgtgggatgtgttccgcaaagacagctcggtgcgctcacgcgttgaaaaaagcgaagccaacgcgcaagccaccaatgcggttattccaccggccagaatgcctgataactgatttagcgatcagtttcggtgatccacagctggccgccttccatccacgccagccactgaccatccggcgagaagaccacggcgtccgcagaaggtggattggcgtggttttcggttaaatactcaacctcgccgctttgcgcatgggcacaagcaattcgattacccagcacaaagcccaaccattctcctgacggatgccagttaaatgcagactgaatatccgttttgttatgggttaactggcgcggctcgccgccctgtggcgagataagccacagttgcacaatgccgttatcatctcgcattaaaaacgcgatttgcgtaccctgcggattacagcgcacccagtggcgcgggacgttgactaaccccggataagcccgatggtgggtaaaggttaaacgtcgctgcacgatgccacgcggtggcgcgggcagggttgtttccgttccacttaacggcgcatcacctgctgctttccagccagcttcatcttgcggtaactcaacgataaacagctccggcactttctcgccctttggcgaaagtgtgtcgccaataaacgccagcgcgtgatttcctacccatccttcttcataagcacgattgatttcatcgctgccaggctgcggcgtgggcgtggttttactcaccagcacgcaccagtggctaccgctgtattcacgcggatgctgcttttgtacgttgaccgggccaaacggtgcagcaaccccgacgtttcgcaaatccagcgccgaatcgaactgatgcattacatggtcgttataggtaaaactcaccatttcaccgttcgggctaaagacatgcacatggctgccgccacgcagcgcccctgatgtgtacggaacggtaatatccattgcatcgagattgttcatcttgccgccttcaacaatcacgccgcgacggtgatggaaatcgtaatgccatgtttcatgaggattttcaggtccgtggataaagacatatttctctgactttggatgaacggtcaccacgccgacgtgcgcgccctgtgacacgcgatagataacctcgacctcgccggtatggatattcacacgctcaatggtctcgccggtaaacgacgcgccagaaggacgcacgtcaaataccagccactggctgtcgggcgtccaggtattggtattggtgagcaggtgattacggggagcaaaggttatctgtttcatggcgcggtcctgatacaaaacggttcccgccatcatacttcacaaggacttcactttcagacaatagtcttttgccatcgtgatgaatgtgagtgaaaagatggaacatttcgacgtggcgattattggcctcggcccggcagggtcggcgttggcacgaaagttagccggcaaaatgcaggtgatcgcgctggataaaaagcaccagcatggtactgaaggtttcagcaagccttgtggcggtctgctggcaccggacgcgcagcgatcttttattcgcgatggactgacgcttcctgtcgatgtgatcgccaatccacagattttcagcgtcaaaactgtcgacgtcgccgcatcgctcacgcgtaactaccagcgaagctatatcaatattaatcgccatgctttcgacttgtggatgaaatcgctgatccccgccagcgttgaggtttatcacgatagcctgtgccggaaaatctggcgtgaggatgataaatggcatgtcatttttcgtgcagacggttgggagcagcatattactgcccgctatctggtcggtgcagatggtgccaactcgatggtgcggcgatatctctacccggaccatcagattcgtaaatatgtcgctatccagcagtggttcgcagagaaacatccggtgccgttctactcatgcatctttgataatgcgataactgactgttactcatggagtatcagcaaagacggttattttatctttggcggtgcctatccaatgaaagacggtcagacgcgtttcacgacgctgaaagagaaaatgagcgcctttcaattccagtttggtaaggcggtaaaaagcgaaaaatgcacggtgctatttccctcacgctggcaggattttgtctgcggtaaggacaacgcctttctgattggtgaagcggcgggatttatcagcgccagctcgctggaggggataagctatgcgctggatagcgcagagattctgcgttcggtgttactgaagcagccagagaagatcaacgcagcctactggcacgccacccgcaaactgcgtttaaaactcttcggcaagatagtaaaaagccgatgcctgaccgcaccggctttaagaaagtggattatgcgcagtggtatggcgcatattccacagttgaaagattagccaacgcgcgtcacatcgcccaccagcaggatgtaagagagcgcgccaatcaacgcgacggcggagatataaaccagtgcaggtgcgaacccatagccttgcaacagatattagtccacaaaaaaacacctcataagaaaaggtcttatatcgggcagaaatctgaaaagggagatcaggcgctaaacaggagggaaagaagagtatgctttcaacggcttagctactcgtttaaaggattaatcatgaagttgaattttaagggattttttaaggctgccagtttattcccactggcgctgatgctttcaggctgtatctcgtatgctctggtttcccataccgcaaagggtagttcaggaaagtatcaatcgcagtcagacaccatcactgggctatcgcaggcaaaagatagtaatggaacaaaaggctatgtttttgtaggggaatcgctggattaccttatcactgatggtgccgatgacatcgttaagatgctcaatgatccagcacttaaccggcacaatattcaggttgccaatgacgcaagatttgttttaaatgcggggaaaaagaaatttaccggcacaatatcgctttactactactggaataacgaagaagaaaaggcactggcaacgcattatggttttgcctgtggtgttcaacactgtaccaggtcactggaaaacctaaaaggcacaatccatgagaaaaataaaaacatagattactcaaaggtgatggcgttctaccatccatttaaagtgcgattttatgaatactattcacccagaggcattccggatggtgtttccgcagcattactgccagtgactgttacgctggacatcattactgcgccgctgcaatttctggttgtatatgcagtaaaccaataatcagtaagcgggcaaacgcgtttatgctgtttgcccgcccacagattaattcagcacatacttctcaatagcaaacgccacgccatcttcaaggttggatttggtgacaaagttcgccacttctttcaccgaaggaatagcattatccattgccacaccgacgcctgcatattcaatcattgcgatgtcgttttcctgatcgccaatcgccatgatttcttccggtttaatacctaacacgtcggccagtgatttcacacccgtacctttgttaacgcgtttatcaaggatttcgaggaagtacggcgcacttttcagcacggtatatttctctttcacttcctgcggaatacgcgcgatagcctggtcgaggatggcgggttcatcaatcatcatcactttcaggaactgggtattggggtccattttctccgcttcgcagaacaccagcggaatggtggcaacgaaggattcatgcaccgtgtagtagctgatatcacggttggcggtgtacagcgtggtgcggtccagggcgtggaaatgagaaccgacttcgcgagagagtttttccaggaaacgatagtcgtcatagctgagagcagtttgcgccacggtgttaccatcagcggccttctgtaccagcgcgccgttataagtaatgcagtagtcgcccggctgttccatatgcagctctttcaggtaattgtgaacacctgcataagggcgacccgtcgttagcacgacattcacgccacgggcgcgagctgcggcaatcgcatttttaacggcaggtgaaatggtgtgatcgggcagcagaagggtgccatccatatcgatagcaatgagtttgatagccatgagttccccaggtagattggttcctgacccatgctaacgcgattccgctcaaaaatcagtacaacacccgagggaaaagggggatgcaacgcgggttgcatgctccccatttgcttagcggaagagtttccctttcagcagttccatgcctgcggaaagcagatcgttattggcttgtggtgacacttcaccttgcggtgagagcgcatcaataatcttcggcaattgttctgccagtaaacaggaagccgtactggtatccacgccaagtttttgtccaagatcggataccgcgtttgtgccgagtgctgattccagttgctcgccgctaactggttgattgccctgttgattactcagccaggttgagagaatggcccctaagccgccactttgcagtttttccagcagcacctgaatgccaccctgctcctcaacccaacttaaaatcgcctgatatttccccgcatcgcctttcagaaaggcgccgacaacttcatcaaaaagccccatgataatcacctgtaaagcgttacgtgttgacccaaaaagtatagaactgcgggatgataattgcggattgcagaaataaaaagggcggagatgatctccgcccttttcttatagcttcttgccggatgcggcgtgaacgccttatccggcctacaaaaacatgcaaattcaatatattgcaggagtctcgtaggcctgataagcgtagcgcatcaggcacgctcgcattgttaacgccattaaatatcaatattcgccgctttcagggcgttctcttcaataaacgcacggcgcggttcaacggcgtcgcccatcagcgtggtgaacaactggtcagcggcaatcgcatccttaacggtaacgcgcagcatacgacggctttccgggtccatggtggtttcccacagctgttccgggttcatctcgcccagacctttataacgctggatggagaggccgcgacgggactctttcaccagccagtccagcgcctgctcgaagctggctaccggctgacgacgctcgccacgttcgataaacgcatcttcttccagcaagccacgcagtttctcacccagcgtgcagatacgacgatattcgccaccggtgataaactcgtgatccagcggatagtcagtatccacaccgtgggtacgcacgcgaacaatcggctcgaacaggttttgttcggcattggtgtggacatcaaacttccactggctgccgtgctgttctttgtcgttcagttcgctgaccagcgcgttcacccaccgggtaacggtctgctcatcagagaggtcggcttccgtcagcgtcggctgatagataagctctttcagcattgctttcggataacgacgctccatgcggttgatcattttctgcgtcgcgttgtactcagacaccagtttctctaacgcttcgccagccaatgccggtgcgctggcgttggtgtgcagcgttgcgccgtccagcgcgatagagatctggtactgatccatcgcttcgtcgtctttaatgtactgttcctgcttgcctttcttcactttgtacagcggcggctgagcgatgtagacgtgaccgcgttcaacaatttccggcatctgacgatagaagaaggtcaacagcagcgtacgaatgtgcgagccgtcgacgtccgcatcggtcatgatgatgatgctgtgataacgcagtttgtccgggttgtactcgtcacgaccgataccacaaccaagcgcggtgataagcgtcgccacttcctgagaagagagcatcttatcgaagcgcgctttctcgacgttgaggattttacccttcagcggcagaatcgcctggttcttgcggttacgcccctgcttcgcagagccgcccgcggagnccccttccacaaggtacagttcggaaagcgccggatcgcgttcctggcagtctgccagtttgcccggcaggcccgctaagtcgagcgcacctttacggcgggtcatttcacgcnnnnnnnnngccgcttcacgggcacgggcagcatcnataattttgccaaccacgattttcgcgtcagttgggttttccagcaggtattccgccaacagttcgttcatctgctgttcaaccgccgatttcacctcagaagaaaccagtttgtctttggtctgggaggagaatttcgggtccggcacttttacggaaacgaccgcaatcaggccttcacgcgcatcgtcaccggtggcgctgactttggcttttttgctgtagccttctttgtccatgtaggcattcagggtacgggtcatcgccgcacggaagcctgccaggtgagtaccgccgtcacgctgcggaatgttgttggtaaagcagtagatgttttcctggaagccatcgttccactgcagcgccacttcaacgccgataccgtctttttcggtggagaagtagaagatatttgggtggatcggcgttttgttcttgttcagatattcaacgaacgctttgatgccgccttcatagtggaagtggtcttctttgccgtcacgcttgtcgcgcagacgaatggaaacgccggagttgaggaacgacaactcacgcagacgtttcgccagaatttcatattcgaactcggtcacattggtgaaggtttcgaggctgggccagaaacgcaccatggtgccggttttttcagtctcgccggtaaccgccagcggtgcctgcggtacaccgtgttcgtagatctgacggtgaattttaccctcgcgctgaataaccagctccagtttttgcgacagggcgtttactaccgaaacaccaacgccgtgcagaccgccggacactttataggagttatcgtcaaatttaccgcctgcgtgcagaacggtcatgatcacttccgccgccgatacgccntcttccgggtgaataccggtcggaatgccgcgcccgtcatcctgtacagagacagagttatcggcgtgaatggtgacgataatttctttacagtgacccgcgagcgcttcgtcgatagcgttatctaccacctcgaataccatgtggtgcagaccggtgccgtcatccgtgtcgccgatatacatacccgggcgcttacgcaccgcatccagccctttcaggactttgatactggaggagtcataagaattcgacatcaacgtttctcgctcatttatacttgggttaatccgttattttacccttttccacggtaaacatcttcgaattttcgtccgacatgtctataacgtgttcagcactgatcgcgctgacaaagacctgcgattgcgtagcttntaagcggctggcaagcagcccgcgacgctcatcatcaagctcagaggcaaaatcatctatcaggtagagacaccgccgcccgctttcacgggtgaggaactctccttgcgccagacgtaaggcgcacatcaacagcttaagctgcccacgcgataaggtatcttccaccggcgcaccgtcggcgcgaatgcgtaagtccgctttatgcgggccatgcgcggtgtaggttagctggcgatcgcgttcaaaattacgttccagcacctcagcatattctgtctctttctcccagccgcgctggaaagagaaagtcagagaaaactcagggagaaattgcttacaggtatcagccatatcggccgcgataccggcgctatactccgcgcgccaggtactgatttgctccgccagcgggatcagttctttatcccacgggcgtagctgttcgtaacgtgtcacctggcgcagcgccgcattgcgctgcttgagcaatcgcttgagattgctccaggcggtgaaaaatccgggttcgttgtgaaagcatccccagtcgaggaatgctcttctgtatttggggccgccgttgagtaaagtaaacccttctggcgttatcagctgcattggcatcaggtgcgccagttccgcgactttatgcccgtcagtaccgtcgatgcggactttgctgtcgccctgtttgtctttggttaagccaatcgccgtctcgcgctcttcgccctgtaatcgcccgtggagaacaaacgcctcctgctcgtggcgaatgacgcgaccaatctgcaaactgcgaaacgcccgaccatggccgagcgtatagatggcttccagcacgctggttttgccactgccgttggcacctaccagaaagttaaagccgggagataaagcgagatccgcggtttcaatgttgcggaaatcgcggatcaacaagcgggtgagggacattacagtctcattggcatgacaacataagccgcgctctggctggctgcatcttcaatctgcacgctggaaaccgaatcggtcagcatcatgcggacgttttcgcatttcagcgcgttcagaacatccagcacatagctgacgttgaagccgatttccatctccgcaccgctataggtaacgtcgaggatctcttccgcttcttcctgttccgggttgttggcggtgattttcagctggttttcgctgacatacaggcgcacaccgcggaatttctcgttagagagaattgccgcgcgagcaaacgcctgcttgaggagatcgcagcctgcttccagatgtttgtccggattcttcggcagaacgcggcggtaatccgggaagcgaccatccaccagtttagaggtgaagataaagtcgccaacgtgggcgcgaatattgttgctgccaatctgcacacgcagcggattatcgccgccgtcgagcatacgcatcagttcaatcacgcctttacgcggcacgatcaccgaatggcttggcaaagattgaccaattggcattgaacagaccgccagacggtggccgtcggtcgctacggtgcgcagttcttcaccttcggtttcaaacagcataccgtttaagtaatagcgaacgtcctgatgcgccatagaaaactgggtcgcttcaatcagacgcttcatcgtcgcctgcggcagggtaaattcgacttcactctgccagtcatcgaggttcgggaaatccgccgctggcagggtagacagcgaaaaacggctacgcccggagcgcaccagcatccgctcaccttccagctgcacggcaatttccgcgccttcaggcagaccacggcagatatcaaagaatttgcgcgccggaacggtcgtcgctcctggctcgtgtggctgaaccagcgcaacgcgtgccaccatttccatctcgagatcagtaccggtcagcgacaacgtaccgtcagcaacctgtaacagcagattaccgagaatcggtagcgtaggacgaccacctaacggaccgctcacctgttgtagcggttttaataaatgctcacgttctacggtaaatttcataggtttacgatgacaatgttctgattaaatttgaaaaatcttctttgatatcgtggctctcttcacgcagctgctcgatcttccggcaggcatgaagcaccgtagtgtggtcacgaccaccaaacgcatcgccaatctctggcagactgtggttagtcagctctttcgccagcgccatcgccatctgacgcggacgagccaccgagcgggatcgacgcttggaaaggagatccgcgactttgatcttgtagtactccgccaccgtcttctgaatattgtcgatggtgaccagtttttcctgcaatgccagcaagtcgcgcagcgcctcacgcacgaagtcgatagtgatcgcccgtccggtaaagttggcgttggcaatgacgcggttcagcgcgccttccagctcacgtacgttagatcgtagacgcttggcgataaagaacgccacttcgcctggcaaacgaatgtcattttcgtcggcctttttcatcaggatcgccacgcgggtttctaactctggcggttcgatcgccacagtcagcccccagccgaagcgggatttcaaacgatcctcaacgccgttgatctctttcggatagcgatccgaggtgagaatgatctgttgattaccttccagcagggcgttgaaggtgtggaaaaactcttcctgagatcgttctttattagcaaaaaactgaatatcgtcgatcagcagtgcatctacggaacggtagtagcgtttaaactcttcgatcgcgttgttttgcagggctttaaccatgtcctgaacaaagcgctcggagtgcatataaaccactttggcattcggcttgcgcgccataatgccgttacccaccgcatgcagcaggtgagttttacccagacccgtgccgccataaaggaacaacgggttataggcaccgccagggttatctgccacctggcgagccgccgcgcgcgccagttggttagatttaccttcaacgaagttatcaaacgtgtgtttgacgtttacgttagaacgataggtcggttctgccggggccgggacgttatcccaacctgagcgcgtagaaggcgcagcacgttgcggctgcgtttgcgccacctgtgcaggggccgcgacgttgctcgtcactgccgcttgtggcgtttgcgtcaccgatttggtgccgacttcaaaacgcagctgtggggcatccgctccgcagaaactggttagcagtccattgatattattaaggtacttgtcccgtacccaatcgaggacaaaacggtttggcgcgtacagggccagcgtgttatcgctcagttccgcctgcaatgggcgtatccacatactgaattctgtggctggtaactcatcctgcaatcgggcaagacactgctgccaaagcgaaagtgacacggcggactccactcgaacaaaagtcgataatgactaaggctgaaacattcatgattgttgacgtacgtcgaaaagaccctgcttgagggtgacgcacgaaccgctgtctgcggttatatgcccgatcaagatcctgcaaaacgatcgggaccgcggatcatagcctaaactgcgcaagagatcttctgtttctcacagattttcccgatttatccacaggatgatccagaactcgctaagtgtaaacgatcctgccgcgaggcgggcacgatttacgccgcatattggaaaatttaatgaccatagacaaaaattggcttaatcgatctaataaagatccaggacgatccttgcgctttacccatcagcccgtataatcctccacccggcncgccatgctggttttcactggtgtgaggccgtacgttttccctgcgaaaaggtgcggaaaagcgcggtaaataaggaaagagaattgactccggagtgtacaattattacaatccggcctctttaatcacccatggcttcggtgtccatcgtttcatttttcggcggatatccaataaagccattgaatttattcaagtttaggtagaaatcgccatgaaacgcacttttcaaccgtctgtactgaagcgcaaccgttctcacggcttccgtgctcgtatggctactaaaaatggtcgtcaggttctggcacgtcgtcgtgctaaaggccgcgctcgtctgaccgtttctaagtaataaagctaacccctgagtggttaagctcgcatttcccagggagttacgcttgttaactcccagtcaattcacattcgtcttccagcagccacaacgggctggcacgccgcaaattaccattctcggccgcctgaattcgctggggcatccccgtatcggtcttacagtcgccaagaaaaacgttcgacgcgcccatgaacgcaatcggattaaacgtctgacgcgtgaaagcttccgtctgcgccaacatgaactcccggctatggatttcgtggtggtggcgaaaaaaggggttgccgacctcgataaccgtgctctctcggaagcgttggaaaaattatggcgccgccactgtcgcctggctcgcgggtcctgatagccctcattcgggtctatcaacgcctgattagtccgctactcgggccgcattgtcgtttcactccaacctgttcaagctacggaattgaggcattgcgcaggtttggagtgataaaaggcagttggttgacggtgaaacgcgtattaaaatgccaccctttacaccctggtggtgacgatcccgtcccgcccggaccatttaataccagagaacactaacgatggattcgcaacgcaatcttttagtcatcgctttgctgttcgtgtctttcatgatctggcaagcctgggagcaggataaaaacccgcaacctcaggcccaacagaccacgcagacaacgaccaccgcagcgggtagcgccnccgaccagggcgtaccggccagtggccaggggaaactgatctcggttaagaccgacgtgcttgatctgaccatcaacacccgtggtggtgatgttgagcaagctctgctgcctgcttacccgaaagagctgaactctacccagccgttccagctgctggaaacttcaccgcagtttatttatcaggcacagagcggtctgaccggtcgtgatggcccagataacccggctaacggcccgcgtccgctgtataacgttgaaaaagacgcttatgtgctggctgaaggtcaaaacgaactgcaggtgccgatgacgtataccgacgcggcaggcaacacgtttaccaaaacgtttgtcctgaaacggggtgattacgctgtcaacgtcaactacaacgtgcagaacgctggcgagaaaccgctggaaatctccacctttggtcagttgaagcaatccatcactctgccaccgcatctcgataccggaagcagcaacttcgcactgcacaccttccgtggcgcggcgtactccacgcctgacgagaagtacgagaaatacaagttcgataccattgccgataacgaaaacctgaacatctcttcgaaaggtggttgggtggcaatgctgcaacagtatttcgcgacggcgtggatcccgcataacgacggtaccaacaacttctatactgctaatctgggtaacggcatcgccgctatcggctataaatctcagccggtactggttcagcctggtcagactggcgcgatgaacagcaccctgtgggttggcccggaaatccaggacaaaatggcagctgttgctccgcacctggatctgaccgttgattacggttggttgtggttcatctctcagccgctgttcaaactgctgaaatggatccatagctttgtgggtaactggggcttctccattatcatcatcacctttatcgttcgtggcatcatgtacccgctgaccaaagcgcagtacacctccatggcgaagatgcgtatgctgcagccgaagattcaggcaatgcgtgagcgtctgggcgatgacaaacagcgtatcagccaggaaatgatggcgctgtacaaagctgagaaggttaacccgctgggcggctgcttcccgctgctgatccagatgccaatcttcctggcgttgtactacatgctgatgggttccgttgaactgcgtcaggcaccgtttgcactgtggatccacgacctgtctgcacaggacccgtactacatcctgccgatcctgatgggcgtaacgatgttcttcattcagaagatgtcgccgaccactgtgaccgacccgatgcagcagaagatcatgacctttatgccggtcatcttcaccgtgttcttcctgtggttcccgtcaggtctggtgctgtactatatcgtcagcaacctggtaaccattattcagcagcagctgatttaccgtggtctggaaaaacgtggcctgcatagccgcgagaagaaaaaatcctgattcggtgagttttcgctaaaataagggcggtcagttgaccgccttttttcttttcgtagggcggataagcaccgcgtatccgccacacaaagcaacaggaacatcatgagcgataatgacactatcgtagcccaggccacgcctccgggacgtggcggcgttggcatcctgcgcatctccggcttcaaagcccgtgaagttgccgaaaccgtgctgggtaaactgcctaagccgcgctacgccgattatcttccgtttaaagacgccgatggcagcgtgctcgatcaggggattgcgctatggttccctggcccgaactcgttcaccggcgaanatgtgctggaactgcagggtcatggcggtccggtgattctcgacctgctgttaaaacgcattctgaccattcccggcctgcggattgctcgccctggtgagttttccgaacgcgcgtttcttaacgataaactcgacttagcccaggccgaggcgattgccgatcttatcgatgccagttcggaacaggcagcccgttcggcacttaactcgctgcaaggcgcattctccgcacgggtcaaccatctggtggaagccctcacccacttgcgcatttacgtcgaagcggcaattgatttccccgatgaagagatcgatttcctctccgacggaaaaattgaagcccagcttaatgacgtgattgccgatctcgatgcagtgcgtgctgaagcacgtcagggtagtttgttgcgcgaagggatgaaggtggtgattgccggacgtcctaatgccggtaaatcgagcctgttaaacgcgctggctggccgtgaagcagcaatcgtaaccgatatcgccngaaccacgcgtgacgtgttgcgtgagcatatccacattgacggaatgccgctgcatatcatcgacaccgccgggctacgtgaagccagcgatgaagtggaacgtattggtatcgagcgcgcgtggcaagaaattgaacaagccgaccgcgtgctgtttatggtcgatggcaccacgacagacgccgttgatccggcggagatctggccggaatttatcgcccgtctgcccgcgaaactgccgatcaccgtggtacgcaataaagccgatatcactggcgaaacgctgggaatgagtgaagtgaacggtcatgcgttgattcgtctctcggcaaagactggcgaaggcgtggacgtgctgcgtaaccatctcaaacagagcatgggctttgacaccaacatggaaggcggcttcctggcgcgtcgtcgccaccttcaggcgctggaacaggcagcggagcatttgcagcaaggtaaagcgcaactgttgggtgcctgggcgggcgaactgctggcggaagagttgcgcctggcacagcagaacttaagcgaaatcaccggggaatttacctctgatgatttgctggggcggattttctccagcttctgtattggtaagtaagtcgtctaaatgatataaagggcactgtccgttctgggggaaactaactatcagaacggaacagcgcttgtttttttatgagcatcctgcaccaaaactgcctttactactggctggagcgactttcaacatcttgcagtcctgtctttacagagaacgatattgctttagccgattaagctcctcttgcggaaagttaaattcgtctattgctttccagaatagttctttaaatacaggattgccatttgccttgcttattacatatttgccttcattattcttcgcttccagttgcatcatcacatctttaagataattttcattttcaccaaccacaattttgaatattttcagccagagacccatatatatcatccgctttctctaccgcaagagagaatgacttcccatcaaagtcacgggtaaactgctccaaaatctcatcgaaagtgaacccgtgttgcaacgccaggcgaatcgccgcattcagatatacatcaatgacctgcttactcattgtcttatagctggcaacatacaaagagcaaactgcattatttctgctcagcgacaggagttctctcactacatctttatcattttcataatggctggctatcacttcagctgtctccatccaggcagcaacaatctccgtatgccctttcactatcgcagaatataagcctgatgccttcgtccatttgtctgatgctcccgccactttttctcttgctgccatcagtttcaatatatcttctttatttaattcatttttaaacattttggcttttatattggctagcaatatattaacaacattataatcattggttctaatagcgctatttaaatcatcaattgagtctatttcctttcctatacgaagaagtatttcatttttatttaccccaaattctttctcaaagtcatctatcgccaacaaccatgctttgacaattttattttgattatttttcaaagccctgggaatccagctcactccgagattatctttcgcaaggagtagagtttccaggtcctcttggctaaaattatattttctggtcaactcttntaaatttgttatgtattcattaaacttatcaatagtattgtgatacaataatacacataacccatatattccttcaggtgatttcgcagcaagaatatcaagagcctttgatgctgtcatttcttgagagttttttaatttatcgaaaaaaagaacaatgtttttatatatccccattctcattaatagaaataatgctggtggtgataatggaggttgcaactcattttcaataccacttaataaatgggcttgttcccgagggagataaggagttattcctacacactcggagcaaatatctgttattacccatttttgttttgcctgttgaatatttataaacgattgcaatgacccaaaagaatcacagttgtttgctttatagcgtactgcagtattggttgcattaggatcataaaaggatacaacatattctgtttcaccagcaggcgtttttttgatcctcaagcggacggccatagcgtgtgtttgagattgaacgattgccgtcatatgcgttaacttctctttttccattctgtgaaaaaagacagataatgcctccccaaacttatcactggcaacgacgcatgtaccgggtggtggatttttttgtagattgttaaattgctgctcaagctcgaaaggaatatgtttttgtatatcttccggagatgaatagtaagcctttaatggaactttccctgtatgctcattcattgaatctatacagtattgcagagcaaaatgtctacattctattaaactttttggttttccagtaaaatgcaacaggcaattataatctacaatatcatatttgctattagcttttatctgctcttttgtaaaactctcatcatcagggtacgtatgaaggcaagtaaaaatatcatccaggaattttataagcactggagatacggaaatatgtactatattgattgcgtctgcatcgcttacggttaaaatcataccttcaggttgttgcttagatctggagacaagaattgaatatgcaccatcgctatagaaacctaactcaacttcagaacaatgattaacaaaatgatttaacggcccctctttttcaagtgaataaactgaaggacttttaagatacgcaactatatcgtcaacgaataattgagatttatttttttctccatccaaatcaggcacgaaagaaggagattgtatacatactctgctgacagttacgttatcaaccattttctttcccctcatccatatgaaagttgtagtaataataaggttactatttaaaaatcaactatcaaatttcgctcatttatagagttatttgtctttttacgtcatttccccatcaggtcatcaacctggtaatgaggtgggtaaaccgcgacgtcaacgaggggaacagctccttgtaatggtatccctataatcaatatcatcatcttcaacaataatgataaaaattaaaaaaattatccattcacgtatttttgttaatattctttatgtgtcagttctcataaacacagccaataactaaatgtgattcgattcacatttaaacaatttcataatagacaaatttcttgagtattatactgtagcttcgtgtctttcgaggataagtgcattatgaatatcttacatatatgtgtgacctcaaaatggttcaatattgacaacaagattgtcgatcaccgcccttgatttgcccttctgtagccatcaccagagccaaaccgattagattcaatgtgatctatttgtttgctatatcttaaatttgccttttgcaaaggccatctctcgtttatttacttgtgttagtaaatgatggtgcttgcatatatacatggcgaattaatggatattgcagatgcaatattcacagggatcactgtaattaaaataaatgaaggattatgtaatggaaaactttaaacatctccctgaaccgttccgcattcgtgttattgagccagtaaaacgtaccactcgcgcttatcgtgaagaggcaattattaaatccggtatgaacccgttcctgctggatagcgaagatgtgtttatcgatttactgaccgacagcggcaccggggcggtgacgcagagtatgcaggccgcgatgatgcgcggcgacgaagcttacagcggcagccgcagctactatgcgttagccgagtcagtgaaaaatatctttggttatcaatacaccattccgactcaccagggccgtggtgcagagcaaatctatattccagtactgattaaaaagcgcgagcaggaaaaaggcctggatcgcagcaaaatggtggcgttctctaactatttctttgataccacgcagggccatagccagattaacggctgtaccgtgcgtaacgtctatatcaaagaagccttcgatacgggcgtgcgttacgactttaaaggcaactttgaccttgagggattagaacgcggtattgaagaagttggtccgaataacgtgccgtatatcgttgcaaccatcaccagtaactccgcaggcggtcagccggtttcactggcaaacttaaaagcgatgtacagcatcgcgaagaaatatgatattccggtggtaatggactccgcgcgctttgctgaaaacgcctatttcatcaagcagcgtgaagcagaatacaaagactggaccatcgagcagatcacccgcgaaacctacaaatatgccgatatgctggcgatgtccgccaagaaagatgcgatggtgccgatgggcggcttgctgtgcatgaaagacgacagtttctttgatgtgtacaccgagtgcagaaccctttgcgtagttcaggaaggcttcccgacgtatggcggcctggaaggcggcgcgatggagcgtctggccgtaggtctgtatgacggcatgaatctggactggctggcttatcgtattgcgcaggtgcagtatctggtcgatggtctggaagagattggcgttgtctgccagcaggcgggcggtcacgcggcattcgttgatgccggtaaactgcttccgcatatcccggcagatcagttcccggcacaggcgctggcctgcgagctgtataaagtcgccggtatccgcgcggtagaaattggctctttcctgttaggccgcgatccgaaaaccggtaaacaactgccatgcccggctgaactgctgcgtttaaccattccgcgcgcaacatatactcaaacacatatggacttcattattgaagccttcaaacatgtgaaagagaacgcgtcgaatattaaagggttaacctttacctacgaaccaaaagtattgcgtcacttcaccgcaaaactgaaagaagtttaattaatactactgagtggctataaggatgttagccactctcttaccctacatcctcaataacaaaaatagccttcctctaaaggtggcatcatgactgatcaagctgaaaaaaagcactctgcattttggggtgttatggttatagcaggtacagtaatcggtggaggtatgtttgctttacctgtggatcttgccggtgcctggtttttctggggtgcctttatccttatcattgcctggttttcaatgcttcattccgggttattgttattagaagcaaatttaaattatcccgtcggctccagttttaacaccatcaccaaagatttaatcggtaacacctggaacattatcagcggtattaccgttgccttcgttctctatatcctcacttatgcctatatctctgctaatggtgcgatcattagtgaaacgatatcaatgaatttgggttatcacgctaatccacgtattgtcgggatctgcacagccattttcgttgccagcgtattgtggataagctcgttagccgccagtcgtattacctcattgttcctcgggctgaagattatctcctttgtgatcgtgtttggttctttcttcttccaggtcgattactccattctgcgcgatgccaccagctccactgcgggaacgtcttacttcccgtatatctttatggctttgccggtgtgtctggcgtcatttggtttccacggcaatattcccagcctgattatttgctatggcaaacgcaaagataagctaatcaaaagcgtggtcttcggttcgctgctggcgctggtgatttatctcttctggctctattgcaccatggggaatattccgcgagaaagctttaaggcgattatttcctcaggcggcaacgttgattcactggtgaaatcgttcctcggcaccaaacagcacggcattatcgagttttgcctgctggtgttctccaacttagctgtcgccagctcgttttttggtgtcacgctgggattgttcgattatctggcggacctgtttaagattgataactcccacggcgggcgtttcaaaaccgtgctgttaaccttcctgccacccgcgttgttgtatctgatcttcccgaacggctttatttacgggatcggcggtgccggactgtgcgccactatttgggcggtcattattcccgcagtgctggcaatcaaagctcgcaaaaagtttcccaatcagatgttcacggtctggggcggcaatcttattccggcgattgtcattctctttggtataaccgtaattttgtgctggttcggcaacgtctttaacgtgttacctaaatttggctaaatccttcaagaagccagtcattcgctggcttcttgcctctcaggaaatcacttatgtccaaatggcaactcgcctgatcctccttcaccacgtatgctttgcgtcaccttactatcaggacgctttagcccatgtcccgctttttgatttgtagttttgccctggttttactttatcccgctgggattgatatgtacctcgttggtttaccgcgcatcgccgccgatctcaatgccagcgaagcgcagttacatattgcgttctccgtttatctggcaggtatggcagctgcgatgttatttgccggtaaagtggccgatcgttcagggagaaaaccggtcgccatccccggcgcggcgctatttattatcgcttcggtgttctgttcactggctgaaaccagcacgttatttcttgcagggcgctttctacaggggttgggcgcgggctgttgttacgtggtggcattcgccattttgcgcgacacgctggatgatcgacgtcgggcaaaagtgctgtcgttactcaacggcattacctgcatcattccggtgttagcgccggtgctcggtcatctgattatgcttaaattcccgtggcagagtctgttctggacgatggcaataatgggcatcgcggtactgatgttgtctttgtttattttaaaagaaacgcgccctgccgcccccgcagcttcggacaaatcacgagaaaatagcgagtcgctgcttaatcggtttttcctcagccgtgttgttatcaccaccctcagcgtttcggtgatcctcaccttcgtcaatacatcgccggtattgctgatggaaatcatgggttttgagcgcggagaatacgccaccattatggcgttgaccgctggcgtcagcatgaccgtttcattttccacgccatttgcgctgggaatttttaagccacgtacgttgatgatcacctcacaggtgttattcctggcggcgggcatcactcttaccgtttcaccttcccatgcggtttctctgtttggtatcacgctgatttgcgccggtttctcggtaggttttggtgtggcgatgagtcaggcgttagggccgttttcattacncgcgggcgtagccagctcgaccttaggtattgcgcaggtttgcggttcgtcactgtggatttggctggcagcggtggttggtatcagcgcatggaatatgctgatcgggattctgattgcctgtagcatagtgagcctgttgctgattatgttcgtcgcgcctggacgcccggttaccgctcatgaagaaatccatcaccacgcttgatctcaatctgctgctctgtctgcagctgctgatgcaggagcgcagcgtaaccaaagcggcgaagcggatgaacgtgacaccttcggcggtgagtaagtcgctggcaaagttaagagcgtggtttgacgacccgctctttgtgaactcaccgttggggctgtcgcccacaccgctaatggtcagcatggagcaaaatctggcggagtggatgcaaatgagcaacctgctgctggataaaccgcaccaccagacaccgcgcggcctgaagtttgagctggcggcagaatcaccgctaatgatgatcatgcttaatgcgctgtcgaaacagatctaccaacgttacccgcaggcgaccatcaaattacgtaactgggattacgattccttagatgccattantcgtggtgaagtggatatcggtttttccggtcgcgaaagtcatccccgttcgcgggagctgttaagctcgctaccgttagccattgattatgaagtgttgtttagtgatgtgccctgcgtctggttacgcaaagatcatccggcactgcatgaaaagtgggatctcgatacctttttacgttatccgcatatcagcatttgctgggaacagagcgatacctgggcgctggacaatgtgttacaggagctggggcgcgaacgtacgattgcaatgagcctgccggaattcgagcagtcactgtttatggcagcgcagcccgacaatctgctcctggcgaccgcgccgcgctactgtcagtactacaatcaactccaccaactgccgttggttgctcttcctctcccgtttgacgaaagccagcaaaaaaagctggaagtcccttttaccctgctgtggcataaacggaacagccataatccgaagatcgtctggttacgggataccattaaaaatctttacgcgtcgatggcataaccgaatcgtatgaaacgcgacccgatttcacaataaaatgtaaaaaagttgtaataagcttgtctgaatcgaacttttagccgctttagtctgtccatcattccagtaaatgattactcttgtattcataatggaccattaagcatggagcgaaaaatggcgactcactttgcccgagggattttaacggaaggacatctgatttctgttcgtctcccctcccagtgtcatcaagaagcccgaaacattccccctcatcgtcaaagccgttttctggcgtccagaggtttactcgcagaactgatgttcatgctgtatggcattggcgaattgccggaaatcgtcaccctgccgaaaggtaaaccggttttcagtgataaaaatttgccttcgttttctatttcctatgccgggaatatggttggcgtggcgttaacaaccgaaggtgaatgtggcctcgatatggaactgcagcgtgcgacgcgcgggtttcatagcccacacgcgcccgataaccacacattttccagcaatgaatcgctatgggtcagtaaacaaaatgatccaaacgaagcgcggncgcagctcatcacgctgcgccgaagcgtgctaaaactaaccggtgatgttttgaatgacgatccgcgcgatctgcaactgctgcccattgccggacgcctgaaatgtgctcatgtaaatcatgtagaagcgttatgcgacgcggaggacgtgctggtgtggtccgtggcggtcacgcccacgattgaaaagctcagtgtctgggagttagatggcaaacacggctggaaaagcctgccggatattcacagccgcgccaacaatcctaccagccggatgatgcgttttgcccagctctctaccatgaaggctttttcgccaaattgatagacaaccacaggagtcattatgtctgaaaaattgcaggtggttacgttactggggagcctgcgcaaaggctcatttaatggcatggttgcacgtaccctgccgaaaattgctccggcgagcatggaagtcaatgcgttaccttccattgccgacattcccctgtatgacgctgacgtacagcaggaagaaggttttccagcaacggttgaagctctggcggaacagatccgtcaggctgacggtgtggtgatcgtcacgccggaatataactattcggtaccgggtgggctgaaaaatgccatcgactggctttcccgcctgccggatcaaccgctggccggtaaaccggtgttgattcagaccagctcaatgggcgtgattggcggcgcgcgctgtcagtatcacctgcgccagattctggttttcctcgatgcaatggtgatgaacaagccggaatttatgggcggcgtgattcagaacaaagttgatccgcaaaccggagaagtgattgatcagggtacgctggaccacctgaccgggcaattgaccgcatttggcgagtttattcagcgagttaagatctaaataaaaaacccgccagcaatcatgcatggcgggtttttaacgcgctatcgattttagtgagcgtcgataaatacaatcttcaggataaacagcagcgcaacgatgattacgcacgggctaaggtcacgaatacgcccggtaccaatcttcatcacgcagtaggagataaagcccagcgcaataccttcggtaatcgagaagctgaacggcatcatcacagcggtaataaacgccggaacagattcagtaagatcctgccagttcacgcgagcaagacttgaggtcatcaacacgccaacgtaaatcagngcgccagctgcagcgtagcctggcaccattcccgccagcggcgacagaaagataaccagcaggaacagcagaccaacaaccactgccgtcagaccggtacgaccgccaaccgatacgccggaagaggactcaatataagccgtaacggaagaagtaccgataaacgaaccggtcacggaagagatactgtcgacatacagcgcctgcttcatgcgcgggaatttccccttctcatctgccagaccggctttatcggtcacgccaatcaacgtgccggaggagtcaaacaggttgaccagcatgaaagagaaaatcacccctgccagcccgaggttaaacgacccggctaaatctacatgacccacgacagtcattacgctcggcggcgcagaaacgatgccattgtagtggacatcacccagcatccagcccagcagcgttgtcaccacgatagaaaccagcaccgctgcgtgaatgttgcgtgaggccagaatagcaatgatgaagaagccgaggatccccagcagcacgctgtgagaagtcagattaccgatgctgaccagcgtttccgggttagcgacaatcacacctgcgtttttcagccccatcatgccaatgaacagaccgataccgctggtaatgcccacacgcagactcaccggaatgttggcaatcatccagtagcgaacgcggaaaatcgtcagtaacagcagaccaatcgcgccccagaagattgcgcccatcccgacttgccacggcaagcccatcgcctgcacaacgacaaaagcgaagaacgcattcaggcccatagcgggtgccagtgcaactggcaggttagcaaacagccccatcataatactgccgaatgcagcaatcagacaggtagtgacgaagacggcgctggtatccatgccagcaacgccaagaatttgcgggttaacaaaaacgatgtaaaccatcgtcaggaaggtggtaaaaccggcgatcacttcggtccgtgccgtcgtgccatgttcgcgcagtttaaacacgcgttccagcatcccctggccagaagcctgggttgtgtgttgttgactcattatctatttccgaacaaggagggaaaatccgtcgctatcgtataccaaaatgagacaatatggacggctgaagataacttttttcattgtatttgcttatacggcaacgattgcgtcatgcgaattggcatgacgaaaacgttaaactaacgataaaggaaagacatgtcccagatagaagcggtatttttcgactgcgacggtacgctggtcgatagcgaggtcatttgctctcgcgcctatgtcacgatgttcagggaatttggcattcacgttgacctgaaagagatttttacccgttttaaaggcgtaaaactctacgaaatcatcgatatcatcagtaaagaacagggcgtgacgatggtccaggccgatgccgagcacgtttaccgcgcagaagtagcacgtctgtttgataccgaacttgaggacatcgcaggagcgaacgaattgctggcgagcattaacgtgccgatgtgcgtcgtctctaacggtccggtcagcaaaatgcagcattcgcttggtaagctcaacatgctgcactacttcccggaaaaactgttcagcggatatgacattcagcgttggaagcccgatccggcattaatgttccatgcggcaaaagcgatgaatgtgaacgttgaaaactgcattctggtcgatgactccagcgctggcgctcaatcagggatagatgccggaatggaagtgttttacttctgcgctgacccgcacaataagccgatcgttcacccgaaagtcaccacctttaccgagctgtcgcagctgcctgcgctctggaaggcacgcggctggaatataacgcgataatcgcctccttacttcaacacttacacatcagtcacgctggtttgagatacagaacaccaggtgtctgatgagtaagcgtctattccctatgaataatttatgtcgttattcgtcctgtcatccaccctctgtatggttaagcctgggttatattttgtacaatatcgggataccgttcgaaccaatccagaatattacgcatcgcgtcactgatgtttttatcgtctttatattgattctcaagtctattatttcgaacaatagtaagcttagaacgtattttatcatcacaatcgacaattttcgcattcaatgcatttacttcatcctgcacttctatactattccaattgtcccttttgttatcaaataaagtccttttatcctctaatgatttattacgacttatgattaactctttaatttctcgcaataagtcatcgtaatctttaatggaagctcttatttcctgatagttttttagtaaatcctcccagttaattgcaaatgcactggaaaaatagtaaaaatcgcgagcacacttattgagccctgagtcgtaatctgtcttaaacgattttatatgttccagttggtttgatagtgctttaatttttttttcttcaacaccttcaaaaatgggtgcaagttccttataatcaaatgttacatttgtagcagattctttatgagactcctttatttgcttttggacatattcttttggattttcagtaagtattgttccatctggcggcggaatcattttatttattatagattcaacaaacttaatccggtcactttctatcatattgttaatgatattttgtgcattttcctgcatatctttaaaaataaaaaactcaaccctactattatcaaaatgatatttttcctcgtacgatttattttcaacataaagtgttgataaaaacgactctaactctaaaaatgcgtttttatntttttccttagtctttgactcggaattataaaaatttattacatcgatattgatagcacttaccttttttaagaaatcaggtatttgttctttacttatagctccgtccagatccatatacatgtatttttgcgctgtaagaccatcttttgaataatttgtatttggatcaatagcacagtctttgcacctatctccactgtaataatagcctaaatttgccccaatcaaattactatttttaaagaagacattattgttctctgtatttttcttgctaaatgaagaatcggtccctttctttatactctctacgcatttcgaaaaattatcatctaacttaagatttctcgatcttctttcaatgtaatcagaaaaatactctttggggttaaacatagttctatctgaaccatcttcacgaagaccatcgtttattttaatatgcttcaaattacaattataaaacacagtccccgtatccggccccctgatttcatcataattagacttgttgaacgaatttgccaaaaaatccattccatgagcatcaagccctattatattacagttataaaaatgactcagaagtatactcgagccaggacaacatcctccctggattatacaatcctgaacgaaagactgcataaagagataagaacctaatttttcttgaatactatcaggttgtgtaacggtgtagattttagacgtctcacatctataattttcaattttgcatttagaaataaaacaacctttaaacataccttttattggttttttatttcctgattccacagtatcatcattagtctcataaagctgtatgttgttgaatttacaatcatcgaaatagcaattttcaaaaaccggaccttcaaggttagggctgtttatcactcctgaaaaaattacattcttaaaactacaatattttaatgaatttaaaacatccttagacaacgatgataaattgattgttgtattaataataggaattttatttttaatcagcgtcgcaagttttacagaataattatcaaacgttaatctcaccaagggagaattatcaaaatgtaaatcatcgagataattatcaagcgttaatctctctgaagaaacctgttttttttcgttatcattcgaagtagcccccgtgtagagattaaaggatctactcacaataacttcattattttcatttgtggtaaagtctgtcttagtactaaatcgccattgttgttctttttttgccagagatttaatcttatcgaacacctcggctttattatcaactttcgtgacaaattcgtaaattaagcctttgacttctttaatatgagagccaggaaaaagatcgcgaacaaactcccacagtgtacgttttttaaataaatcccctttgccatcaagaatattttcaatatccttagagtttacattatatttcttatcattaatacttaaagcaattttatcagaatagcctttatgactaagcctctccttatacattgcttctaaaaaaggattagtattaacaaaaacatctggttttaatttagcgaccataaatcctccggcgtgtaatattgagttgtttgaaaaacaataacttctatgttgttaattaactgtactgctagttaggttagcaacaagtgttacttatattaccggtgaatactgtaaaaaatagctcattatttccattttaacccagggtgttcaccctggatttgcaattttttgggggttaacggtacattccacgggttaaccgcagcatcagaaaatgnnnnnnnnnnnatagccgcttttattgtcgaggttaaaataaagagattttattaaattttatcaaggtgatttatggataatcttattggcacaccaccaaaccacgcagttccccataactatatagacatggagcaaatggaatatttatgtcatctcaatcgtttttctaaattgtctgacgattttttaataaatggtccaagagaggacctttttacatataaatatgttttagatggttcattttcaaatttacagcatttacttcctaaaggacaactacagaagatacaacagagattaagttctcttatgcataannacatgtttcattgttttcatgtttttttattaaaactatgctcaattgagagtattcctctcccaaatgccgattacgctttctttgatgacgaaatgccatttacattaactgatgaacagatcgaaaatatttcttttttaaacgcatatcacaaagaaaagaaaggaaacaacgacattgttacatttgatttcatgagcgctgatcaccactataattttagcacaaccatagctttaacaaatgatagcttccatatatcttcaataaacaaccataactcacaggttatattcgatgaaaacatccatttacatccctatgaattaccagaatcatcacaatggtgttatcagttaataaaaaacatgatttctttacattgcagatataataacaatttcaagataaactaaaccttttgttttgattttaaaaataaatctttttgtaatgccaggttgcaatatataacgtttattgcatgtttattttcacatgcaaacatgaaatattcgacatttcatgatgttaaccttgatatgtgtgagataaagaattgcaattttgacaattcagagatgaatttcatttcgtgcgtcgggacaaattttagcggttnnnnatttaacaatgtaaaaacaacaacagcgcaactaattaagacaccaacaaagtggacgaataatactctaaaatattggttctccagttgtaataaacgtaatatcatcttcacttttaatacaatatctgatagaaatatgaaattaaaaggtatcaaggatatattactgtcgttggttgaccaaaaagtcaatatttatagtgtaaggcaagagcttctggattttcttaataatgatttatataaaaatgatggagagattctctcttataaagaatcaataatgttgttttgtgctgaatagccgaaattagattattcagattaactaccgcactctatgttgtgtttatatccatgtaaggaaacaggtcatttgtgaatcctgacaccagactatgactatcgcccagggataatccacaaccgctggaagcagtctcttttcagttggataaaaccgtaaagtgcgattgcgataaataataaatacaggcttattattccagtcttttttattgcgttggttgattcaaatggctcggttagtaaaatgcaccattcactcggaaaactcaacatgttgcactcttatacgccgtatggaaaagacgtaggagtggtataaccatttaatcgtctcccaacgtcaacgcttacacatcagcgacactggtttaattaaagcataccagatttctgatgagtaagcgtcttttcgtataacctcattgtcataggaacgacttgatccgtttatttattcgccatgttattcagtatcaattttcttaatagctttcaccatattttgattttcttttagccaagtcctgatattttgaactacatcattaagtgtattctcttgttgatactttatcttgaatctctctgtttcagagaaaagatcccggattgcattatctatttcttcaatttttttatctattttctttatatcattttcgattttgactttttcatcattatcatttaaattaagcatcttctcattaaaataaacctttctttctagctgagcatctcttgtgccagaaaggttggctaaatcttgaaatttannannnnnnnnnnnnnnnnnatnattattatttctatcaatgacccccaataaatattgttcaatgtcaaagaatgaagcaatttcatgggctacatttgctggtttttctatatatttctcttggtttatttttttcttctgccttaaagtttttcaccgttaaaaaaagatttttcttttccaaaaatttctcctttgtaggcttattcttattctcataatcgtagtaaagtacttgcaaaccagcaaaatcaaagtaaaatccattaccatttggattggcagtacgatatgttttttcatttccattttcatcgtaatgtctataccaataaaggttattatagattttatgcatgaaattcactttatcagtatctatttcactagctatatctttttttctattgtacaaaacattatctataatatattttataatttcatcattgagttgaaaatcttttacatcatcaccaggcataatgttatgcagattaactaataaggattgtaaatcggctagtgcctttttgtaattattcttcatattattgctatatttataaatatcttctatccgtgaataaatattcgttaccttttccatgaaaggtaaaatgtctttttcagctatagctcctctatggtacatataaacaggaattttaacctgagtgtttgcagcaagattaccacttaagatagtggtatgagtatcaatagcacaatcatacaagggattcccaccggttaactcgcccaaacaagcagcatataaacagcaatgattaagatttaaatgtttatctatatcgtcttttatattataatgagttnnnnnnntttggaaaatatcatcgtggataaaagttaaaagagctttatccagattaagtttatttttattttcactttctccgaaatattttcttggatcataatctcgtaaatcttcacgaattccatctcgtttgcatgtcatattaacataacgaaaatcacaatcataaaaattattactatctctaaaaccaccgcgagtttttccataaaacgaagttcctatgaaatccattccaacaccattaagctttgctatattgcaagataataaactgcttgcaataacacttgcttctttacacactccatcttgaagattacttgcatatacaaatgactgcataaacagatatgcaccgactttcttatcccctctttggggatcttgatttatagagtatatttttgatgtctctatcttgaaatttttcatttcgcattgatacaaaaaacaccctttaaacataccgtaaatcggtattttattatttggttttacgttacaaagaacgtcatagctttcacaggtcactttatcaaagccaacaagggacacattctcgaaattacattcctcaaaaaaacaattttcaaatactgggccattaagattttcgtaagatatattacctgtgaatgtcatctttttaaagcaacactgttttagcgataccagaacatcttttttcagtgcagataaatcgattatcatattttcaaaggggattttattttttaaatatacgcttagtttttcattatcattagggaactgcattttcaatatccctgattgaaaagccttctcatcaaaatgaatatcatgtttataactattataattgcgttcttctgataatacagaacgcattgtattttcttcagcattattatgattatctttcgagttaatatttattttaaatactctactaacaataatctctttattctcatctactgtaaattctgtcgtcgtactaaagcgccatttttcttctggagtagcgagagatttaattctctcaaatctcttaactttgtcctcagttttcgttacaaattctacaattgtttctttagcctccttaatatgatacatgggaaagagatcgagtataaattcccaaagagttagtttaagaaaagattgtctatcaccagctataaggtttgttatatctttatgggttattgaatacttctcctcattaccaacagacaaacaaannnnnnnnnnnntttttgcaatccattattttcatctggcattttagtcagattagcaaatttatctgtaactgtactatatgatgatatagccataatcatttctcctgaacacaatatttattcgcccgagcataatacattgccgatttgtcttaaaaagcatacctgggtgttggtttgctacgattatgactaaaccacctatgaatactgtaaaaaatcgctcattttttatgtctcgatatagggcttttaccctgttttttgttttcttttccattctatgtgcaggtagcgatataaatgaaaagaataacaaaaatgtttttatagcgaggcactacgttaaaagtaaaataattcaaatgaaataatgtatatgcaatgtactggggagagtttcgaggtgagtttgtgtggcaatatttcagtgagaaagtgtatcagcccggtaactatgtatgaccgggctgattgccagatgcggcaaaaagctttatctggcctacagttagcactactctttggggtcttttcccgccagcagtttatccagctcatcaccgcctacatgacggaaatcctgacccttcacgtagtagaagataaactcacaaatattctggcagcggtcgccaatacgttcgatagaacgcgcacagaacagcgcggtaagtacactcggaatggtgcgcgaatcttccatcatgtaggtcatcagttgacgaacaataccttcgtactcctgatcgacttttttatcttcacgataaatacgtaccgcttcgtcaatgtccatccgcgcgaacgcgtccagcacgtcgtgcagcatctggatagtatgacggcccagcgactccagacttaccagcaacggctgatgctgctgggagaatttctccagcgcagtacggcagattttgtccgccacgtcgccaatacgctccagttcggcaatggttttactgatcaccataaccaatcgcaggtcgctcgccgtcggctggcgtttggcaataatgcgcacgcaggcttcatcgatcgccacttccatcatgttgacgttcttgtcgccttcgatcacgcgcttcgccagatcgctgtcctggttatgcatcgcggtgattgcatcagaaagctgctgctccaccatgccgcccatggtcatcacctgcgtgcggatactttccagttcggcgttgaactggccggaaatatgtttattaagattgagactgtccataacgcactcctgaatcaaccgtaacgaccggtgatgtagtcttctgtttgtttcttcgctggcttggtgaacagatcgtccgtgttgctgaactcaatcaattcgcccaggtacataaacgccgtgtggtcggaacaacgcgcagcctgctgcatgttgtgggtgacgatcaccacggtgtaatcctgcttcagttcggtgatcagctcttcaatacgcccggtggagatggggtcgagcgccgaacatggttcgtcgagcagcagcacttccgggcgaatggcgataccacgcgcaatgcacagacgctgttgctgaccaccagagagagagtaaccgctctgatgcaatttatctttggtttcgttccacaatgcggctttggtcaatgcccactgcacgcgctcgtccatgtcggcacgagagagcttctcaaacagacgaacgccaaaggcgatgttgtcgtagatggacatcgggaacggcgtcggtttctggaacaccatgcccactttcgcacgcagcagggcgatatcctgagagttggtcaggatgttgtcgccatcgagcagaatttcaccttccgcacgctgttccgggtacagttcaaacattttgttgaaggtacgcagcagcgtcgatttaccgcagccggacggcccgataaacgccgttacctggtttttggcgatatccaggttgatgtttttcagggcatggaatttgccgtagtagaagttcaaattacgaacctgaattttactcggggcagtttcaaccatactcattgcaatcttttcctcatcgtgcctgatgcacttcgcgaatcaggcttaccgtaggccggatcaggcgttcacgccgcatccggcaaagtgttaaccgtgtacagagtcaaaaaggcgctcggtcggtcccctcgcccctctggggagagggttagggtgaggggaaaaccgtgtcagcaatatcaaccgtgtttattcttcgcgaaaacaacgcgcgccagaatgttcagcagcagtacgcacagggtaatgatcaataccccggcccaggccagttgctgccattccgcaaacgggctcatcgcaaacttaaagatcgtcaccggcaggttggcgatcggctgcatcatgtccgtgctccagaactggttggagagcgcggtaaacagcagcggcgcggtttcaccagcaatacgggcaatcgccagcaggataccggtcatgatcccggacaccgacgctttcagcgtaatcgcggagatcatcttccacttcggtgtacccagcgcataagccgcttcacgcaggctgtccggcaccagtttcagcatgttctnggtggtgcggataacaatcggcacctgcaacaacgccagcgcaatcacacccgcccaaccggagaagtgctccatctgcgccaccacgatggtgtaaacaaacagaccaaccacaatcgacggcgcagagagcagaatgtcgttaatgaagcgaatcacttctgccagccaggatttacgaccatattcagccagataaatccccgccataatgcccagcggcgtaccgaataccgtggcccacaaaattaacagcccgctacctgccagagcgttcgccagaccaccaccttccgtattgggcggcggcgtcatttcagtgaacagcgccagcgacataccgtcgataccgcgggtgatggtggacattaaaatccagatcagccagaacagaccgaaggccatcgtcgccattgagagcgtcagtgcaatacggtttttgaggcggcgacgcgcctgcattttgcggcgggattccgccagcgccgcagtggtttgcatttcaaccatagccattagcgagccccctcattcttagccaggcgcataatcataaacttcgatgcggcgaggacgatgaaggtaatcacaaacaggatcaggcccagttccatcagtgcggcaacgtgcagaccggattccgcttcggcaaattcgttcgccagcgcagaggtgatactgttgcccggcatgtacagcgaggcgctgtcgagctggtaggtgttaccgataataaaggtcaccgccatggtttcaccaagcgcgcggcccagccccagcataatgccgccgataacaccatttttggtgaacggaagaacgatacgccagataacctcccaggtggtgcagccaataccgtaggccgactctttcatcatcaccggggtttgttcgaacacatcgcgcattaccgccgcaatgtacggaataatcatgatggcgaggatcacgcctgccgcgaggataccgataccaaatgccgggccagagaacagcgcgccgacaatcgggatattcgacatgatattgccgaccggctcctggaagtaaacggcgaacagcggcgcaaagataaacaggccccacatgccgtaaacgatacttggaatggctgccagcagctcaatggcgatacccagcgggcgtttcagccagccaggcgcaagctcagtcaggaacagggcgataccgaaactcaccgggacggcgatcagcagcgcgataaacgaagtcaccaacgtaccgtagatcggcaccagcgccccgtagatatcgttcggcgcatcccactctttggtccacaggaaagccagaccaaatttctgaatgctcggccatgaggagatgatcagagagacaataatgccacccaacatcaatagcacaatcagcgccgccagttttaccagcacgctgaaaattatgtcgccctttttacccggtgggttaaaagcaggcttggttgcagccataagttactcttcagttaaacgcgtttacaaagtcattttgtaatgccggataagccgtttaatgccttatccggcctggagttttattagtacagcggcttgccgctactgtctttaatattggtcttccacgcagcgcgaacctgttcaactacgctatccggcaggctggcgtaatccaggtcgttcgcctgtttagccccggttttgtacgcccagtcgaagaatttcagcacttctgtgccttgttctggtttcttctgatctttgtggatcagaatgaacgtggtagaggtaataggccacgcatcttcgcctttctggttggtcagatcctgagcgaaggttttgctccagtctgcaccttttgctgcattagcgaagttttcttcggtcggcaaaacaggtttaccatcagcggagatcagtttggtgtacgccaggttgttttgcttcgcataagcatattcaacgtaaccaattgcacccggcagacgctgaacgaacgcagcgataccgtcgttacctttaccacccagaccgatcggccattttacggtagagccagtaccaacgttgtttttccactcttcattcactttcgccaggtagctggtgaagacgaaggaagtcccggagccatctgcgcggcgcactacagcaatgttctgtgaaggcagtttcagacccggattcaatttggcgatggcttcatcatcccacttcttgattttgcccaggtagatatcgccgagggttttaccatccagcaccagctcaccagacttcagacctggaatgttaaccgccagcaccacgccgccaatcacggtcgggaactggaacagaccttcctgagccagtttttcgtcagacagcggcgcgtcagaagcaccaaaatcaacggtattggcgataatctgttttacgccaccggaagaaccgataccctggtaattaactttattaccggtttctttctggtaagtgtcagcccatttggcatacaccggcgcagggaaggttgcacctgcacctgtcaggcttgcttctgcaaacacagagaaagcactcatcgataaggtcgcggcgacaacagttgcgacggtggtacgcataactttcataatgtctcctgggaggattcataaagcattgtttgttggctacgagaagcaaaataggacaaacaggtgacagttatatgtaaggaatgtgacagtttgatgacacccaaaggaaagttattacttattgatattgaaggggaaaaatatcagcattttttcatgaaaggagaggaaatatgaacggctgtcataaaacagccgcaaaaggttagtttacaaattcaatggttaaggtcgcggtagcgttaaaaacgccgggctgaggccgggcaccggtaaagctggcaggtgctgccgaaaaagttaccgaaccatttttacgaccaaaaatggtcgtgttgcccatgtctgcgggtaacttgccgttgttgacgctaacttcagcattcgatttattgtaaattttgatcccgacatcagcattgtctgtcgccaccatcgtatcgtcactgcttcggttcgtccccgtaaaagaagcatcgactttctgcgtacgctcataccccatccccgtacactcaatactcactgttttagtgatttttcgtgaagtaatggcttgcccggcggtagatgaaaattcggacgcaggaatagtatcaaaatcaaaataaatcacctgtcctgcatttatctgacaagactgtggtgcggtcaaactgcctgaaattcgaacttttgcaatcgcctcaccacgggtcgtggtgctggatatgttggcatacagcaatgcaatatcggtgataggtattactaccgttccatttattgaacgtttaatacgaaatgaaatcttcgcatctgctccagttttcaggctcacgccaaccgctgtagttttgtttccctgacaagtgtgatctgttgtagttgcctggttggaaacatgttcaaaaggaactgccgtataccccgcatttagcacagatatttttgttcccacatcgacatattcgttaagatagtaaaaagcaagaccacttgcggtggtgctataaaccataccgggagcagggtctgcggtataatatatttcgtgataagcgccattgctatgttttgaatcacagttacacagaacgctataattttcagaagatgttgcattagcaatatctattaatgtatttccaggcacattgtttgctgcactgaccgttgtcagaggaaaattaaggcttaatgtatgtgtgccgcctcttgttgcacacgtgccatcatttgccgcatacccgcacggtaaccctaaatgaaagagaattatgcaaaatatataatgccattttttcatgaaattattccttttactaacacaagattagttagtaaattcaataaccagcgtggctgtagcggtaaatccattatcaggcgctggttttgcgcccgtcagactggcgggcgctgaataaaacgttacgctaccatcggtttttcctaatcgactaatagcacccatatcagcgggtaagttgcccccatccacattcactggacggtcgttcttatcaaaaatcttaattcccacatccggattactcgtcacgatcatggtggcatcggcacttctgtttgccgcaatcatcgacgcactcaccacctccgtggaccttacgtcttccatcctggtacaggatactgtgacttcggttttaatctttctttctgcaataattgaacccgccgttgaggagaactcagcgctattaattttttgaaaatcgacatcgatgctctgatttggcgttaactcacagttctgcggggccgttagttgtccgcgaattgtcactttagaaacgggggtcgttttgggaaaatgatcggacatgcccgcgtacaaccaggcgacttccgttgtgggtattgtcaccgtgccagtaatagaatgccgaacatagaaagataattttgccgagcgccctgaatccagatttacagtgctcccattattacctgctccacaggtatgttgcggtgaggtggattggttggataagtgttcaaaaggaatggccgcatattggttattaataatannnatcgtcacgccgaccgataaataatcattcagagcatagtaatttaacccattaagagtgcgctcaagcacaagccccggtgcggcatctcccgtgtagaagataggaaaaaatgctgtttgttggcccggtccgccatgcgtgtcatcacagtgacagcgcaccgggtatgttccagtcgtgttgctcagtgcctcgaaaatattgtatccggagtggttattcgccgctgccaccgtcagcggaccaaatgataaatttgacatgtgcgttgcgccatcacyattagcggcgaaaccataaggacagcaaagcagcaaaatcaaccctgataatatttttttcattcatgcttcctttagcgacaaatcgcatccatttgaaccaggctggtatcatcaggtttatgggtgatgtgataggccgccttacatttttcatccgcagcttgtccccaactcaataaaaactcgcctttttcaggcatcccggagagatacagttcgccgttatcaccgacaatcccggtgactgtgcccgtttcgagagaggcggttgccatcgcgccaaacattattggtttaccgttgacctggcggacgttaaatagcacgcgataaccgacatgggtgacaaattcggctttcaccaccgcaccgcgcgttggtaccaggttgatgacggtgttttccagttcaatattggctttggagaaatagtcgctgttcaatgccacgcggttttcgtcatacgggctaagctgcgtttttacggtataaccacgccagtcggtagaaatcccggtggcgttttcaatggacaggccttctgcgcccggcgctttgaccaatgccaccgtttcgcccagttcctgcgagaaggtcactcagtcactatgcaccagcacgccgcctctggcgccataatcaaaatgttgggagtcacggctccaggaatagctaccattgaccgagccataagtcccgtcataggtcattccggcattgccgctgtaggagtcatcaggagagtgcatccacgattcctgtacgttataagacaggttacgcccttccagcatcgttccgttcagaccgacctgcatcgtgctttcatggtggttgttttgcgttaacgaatagttgacgtagctgtcttccatccagcacgatagcggtatcgacattgagaacatgaaaatctgttctttgccgaaatcatcattgttatcatcatgatggttgcccgatgagcgcttgatcgagtccgtatagttccaggaaacgttccaggagatgtttcgccagttgttgttatagccgaactgtaataaacgttcgacctcatcggtctgccagtattcctgtcgactgaatgttaaataaatattgccccagcctggcgtgaaagattgcgtccaggtgccttcgaagcggctgcgacggttgcccgttacccagaaatcagaatcattatcctgtcgcgacacccattcattgagggtgtagaacccctccgtagagtagcgataacccaccagacgaaaggtggtattggtgtcttcaaaacgtttggaatagagaaaacgatacgattgaccactctcattatcgtcgtagtcaaactgcgagcgggcatgagtcacgtcaaaagaaatcgcgcccagcgcccccatatctttaccaatacccagcgcggcagaagcgtaatcatttgccaattgtgttccgccatacaaagttattcccaaagggaaaccgtgcattgcttgtaactgcaagacctcaggcgtaaagccgctttcgtcgcgcacttctccaatgctaaggtctacatcggtctgaccttcacgcttgagaatggccagtgaagtaaatggctgaataaagtgctgctcgctgccatcttcttctttgatagtgacatcgagatcgccgccgctactggtcgtgtttaagtcggtgagggcaaatgcgccctgtggtacggctgattgataaataacgtagccgttttgtttgatgatcaccgtggcgttagttttcgcaatcccatgtaccactggcgcaaagccgttctggctggagggcaacatatcgtcatcggtatacagccgcacgccacgcacctgtgtactatcaaatacatcgcttgccgtccaggtatcgccaatcataatctggctacgtaatgccatgatgtcgcgctgaatgtaattactgacggaatggtagtccacattaccgtcataagaattcagggtgctgtaattacgaaaacgccatgcgcctaaattaataccattacgcaaattcagataataactgtcatcgtcgtcgtcataatttgaccggatggtatgcgatgccgaaaaatcataattcatcatcatggcattgatcccctgatcccaacgggaagggctgatataaccattaactgcattgttgagataaatttgcggaatagtaatattcaatgcaagtttactggcgtccagtaaccaggtagccccgtcgatcagcggaactggatttacgcatgttttgtcatcaacattcgccagagattttatcgcatcaacttttataccataggtcgccagcacgttttttatcgccacgtagcatgggtggagttcagcatcagggttatcctgggcgaatttaacttcctggcgttcgaagagcatgccgttgatcatcacatcaactttgtatgttcccgcaggtaaggtattcgaacggttgaactggtgaatatcaatattatccgcaggatgatccagttccagtaatctggggttgaacaagctatcccgggcaaaagcagatatggaacagagcagacatatgcccgatgcaagcgtaatgaaaagatgcgaagaggccatcgatatatccttatccggcgcttaaaggtttttctttagtggttgactaattgcaccgtaatcattaataaagcgccaaacgagcgattttcctgccacgccagccggaattggtaatgtcaatatttcaaaagggcggatcatatttagcgacacgtctttatcatccaccgtcacactcattacattaatatggatcggatttggattttcgacgatgagattattaccctgccgcgaccatttaacatttttaatagcctgctcagggattatctttaccgcggctggtcgccagaataacttaattcttgtttttatggctatctcaagaacattggtatttttttatcaattgaaggagggatgtttttcacgttcaaccagaatacggactcccgatcttttggtaactcgccagccgtttttaaaatgcgtaatattttctcttgctgtggttcaatgcgagaaacgggaggtatcacagaaaatggcggtttgcttttatcctctttattaaatggatcaacccatgtctgcaatagataaggaaggttcgtttctttattaaaaatagagattgtggtatcaggtttgtcaccataaaaaataacgcgagttcccccaacaacaataccagccgtagccatcgacatctgcgtaatcaaagtaacagcaaaaaacaatctaagtaaatacataggcataaatgtatctcataaaanatataataatgacgtccttcatttaagtaaaagagaaccataatggcgagcgccattttatttaaggtattatgttaagaatgatttattttatatattcaactgtaaactgcgagtcggcgttagctgtaccagggtcaatagtcgtttccgtagcaatataacgagccatgaacttcatggangcattaccattagaaatcggagttgatgcagaattttcatataacttgacctgagtgttatctgcacggttatataaacgaatagctacgcctttcgctgcactaacggcacccgcaccagtataatccccactgttatcactcgggctaataccagcggcagcatcgttagagttatccagcggggtaccaattgccaggttgccattaccatgagcatcttcattaccatcgaaacgaattgcggcggacttaaaggtttccgggcattgagtcagatcgatagaaaaagccgtcggggcagccacatcatcgacgccactaaaggctgtacggtttactttgcctaagtcaacgacctgatctttagtttcaggagtgacttcgcaagtactgtcaataatttcaccacggaaatggactgttccatcagccgcctgtaggtgacctgccataaacacagaagttaacgctaatgctcctacaatcatatttggtttcataaatataactccattaatttgatattattcctgtgtgttatccatttattaaatttggataaacctgatcggtatttgatcagaaaccaaatagtactaccaatatactttggcgcaagtggtttttattttatacatttagataannnnnnnnnnnnnnnnagcaaaactaaatttatatcgttatgtgattgcttaaaagaagagggaataataaatggatataaatattatttttatgatgaggtgattttttaattatatcacacatctcaaagcagacaattttttcatatttacataatccacaactatgaattcgcgtagaaaacagtcttatttttagtaaaccacactttcaaattatattttttgcctatatttgtggaaagactatacatttacagtgataatttattatcacacattgttacatagttaaataaaattacatattgatgattgttttacaagcgattcttgaatgaacaaaacgtgctattcattacaaagtacatcaattatggcaattgtttgtcaatgattcgaggtatttaattactactacggttaaaacaagtgttcaacggtgccccaaataatagctgaagttaattatatggaatgaggttagattattaatgctggtaagtaaaagggccgccaaaaggcagcccttcgttcagcaaatgaataatattactcaaccgttaccgattttgccaggttacgcggctggtcaacgtcggtgcctttgatcagcgcgacgtgataagccagtaactgcagcggaacggtgtagaagatcggtgcaatcacctcttccacatgcggcatctcgatgatgtgcatgttatcgctacttacaaaacccgcatcctgctcggcgaagacatacaattnnnngccacgcgcgcgaacttcttcaatgttggatttcagtttttccagcaattcgttgttcggcgcaacgacgataaccggcatatcggcgtcaatcagcgccagcggaccgtgtttcagttcgcctgcagcgtaggcttcagcgtgaatataagagatctctttcagcttcaatgcgccttccagcgcgattgggtactgatcgccacggcccaggaacagcgcgtgatgtttgtcagagaaatcttctgccagagcttcaatgcgtttgtcctgagacagcatctgctcaatacggctcggcagcgcctgcagaccatgcacaatgtcatgttcaatggaggcatccagacctttcaggcgagacagcttcgccaccagcatcaacagcacagttaactgagtggtgaatgctttagtggatgccacgccgatttccgtacccgcgttggtcatcagcgccagatcggattcgcgcaccagagaagaacccggaacgttacagattgccagcgaaccaaggtaacccagctctttcgacagacgcaggcccgccagggtatccgcggtttcgccagactgtgacaaggtgatcatcaggctgttacgacgcacggcagatttacgatagcggaattcagaggcgatttcgacgtcgcacggaatacctgccagcgattcaaaccagtaacgggaaaccataccggagttataagaagtaccacaggcgaggatctgaatatgctcaaccttcgacagcagttcgtcggcgttcggtcccagctcgcttaaatcaacctgaccgtggctgatgcgcccggtaagggtgtttttgatcgcgttcggctgttcgtagatctctttctgcatgtagtgacggtaaatacctttatcgcccgcgtcatattgcagattggattcgatatcctgacgttttacttccgcgccagttttatcgaagatgtttaccgaacggcgagtgatttccgcaatatcgccctcttcaaggaagataaagcgacgggtcaccggcagcagcgccagctggtcagaagcgataaagttttcacccatacccagaccaatcaccagcggactaccagaacgtgctgccagcagggtatccgggtgacgggagtccatgatcactgtaccgtacgcaccacgcagttgcgggatagcacgcagaacagcctcacgcagagtaccgccctgtttcagctcccagttcaccagatgggcaatcacttcggtgtcggtttcagaaacgaaggtatagccacgcgcttttaactcttcgcgcagcggttcatggttttcgatgatgccgttatgcaccaccacaatgtgttcagaaacatgcggatgcgcattcacttctgaaggttcaccgtgggtcgcccagcgagtgtgagcaataccggtgccgccatgcagaggatgttcttccgctgcctgagccagcatctggactttaccgaggcgacgcaggcgggtcatatgaccttccgcatcaacaacggccagaccggcagagtcatatccgcggtattccagacgacgtaaaccttcaagaaggatttctgctacatcacgttgcgcgatcgcgccaacaattccacacatagtttttgattccgatttatatcgttgtcggtcaacctgtatgcccgttttttcgggcgccccgagccttgtagagagtggggttatttttatagttactgcttgtgggagggagattatgttatctcctcatcccatgtgaccggattacccggccagaatcactttttctttaccggacgacgccagccttctttctgagtctgcggcacacggctgatagctaatgcattttcgccgacattacgcgtcacagttgtacccgcagcaatggtcgcgcctttgcctactgttaccggggccaccagctgagtgtcggaaccgacaaacacatngtcgccgataatggtcttaaatttattcgcaccatcgtanttgcaggtaatggttcccgcgccgatgttaacgttatcgccaatttccgcatcgccaaggtaagtcagatgaccagctttcgagcctttacccagacgtgcttttttcatctcaacaaagttaccgacgtgtgcaccttccaacaactcagcaccaggacgcaaacgggcaaacgggccaatggtacaggccgccgccagattcgcgtcttccacgacggtatatgggctaatttcgcaatcatcgccaatcacgctgtttttaatcacgcaaccggtgccgattttcacgcgatggccgagagtcacgttgccctcgatgataacgttagtatcaatttcaacatcgcgcccgtgagtaagcgtaccgcgcagatcaaaacgcgccggatcgcgcagcataacgcctgctaacagcagtttttcagcctgttcggactggtaaacgcgctccagacgggagagttgcaggcggttattcacgccttctacttcgcttaaacgttgcggatgaacggcgacgatttcacgcccttcctgatacgccagcgcaataatgtcggtgatgtagtattcgccctgcgcattattgttggtcagcttcgccagccagcgtttcatatctgcgccgttagcgatcagaatgccggtgttgatctcctgaatctgacgctgctcgtcggtggcatctttgtgctcaacaatgccggtaactttgccgttttcacgggtgatacgtccataaccggtcggatcatccagtttcaccgtcagcagaccaatgccaccctgcggtttagcatcacgcagacgctggagtgtttcgacagagatcagcggcacgtcgccgtagagcattaaaatgtcttcatcatcggcaaagaaaggtgcggcctgctgcatggcatgacccgtacccagctgctctgcctgaagcacccagttcaggttgtcgtctttcagcgcctgttttagcagatcgccaccgtgaccgtacaccaggtgaacgtgcgctgcgcctaattcattcgcagcatcaatgacatgctgaaccatcgctttcccggcaagggtatgcagcactttcggaagatcggaatacatgcgcgtgcctttacctgcggcaaggatcactacgctcatagcattattcaacatacgcgtcctgactgtaatttgagaacgaatttaaaccgcttcaccttgaaaaaactacatttttttcatcgtgaaatggacagaggataaattgttcaataacggattatccccgctgacgaaagcgccattttcgaccatcgtcacgccttttgtctgcagaaaattaaggcagtaccttcatttaagcgtcaggtggatgtttttgctcttatttcgatcaatgaataaacgggaaaacagggggttttatatcagcaggatctatgtgaacgctattcaggacgggtcacacgcgcaaaaaaaagccagcctgtttccagactggcttttgtgcttttcaagccggtgttacatcgcttttttggtcaactcgataacgcgcagctgcgcgatcgctttggccagttccgcagacgcctgagcgtaatctacgtcgccgtgagagctgctaatgtgctcttcagccttacgtttcgcttccatggctcgcgcttcgtcgagatcctggccgcgaattgcggtgtcggccagaacggtcacgttgccaggctgcacttcaagaatgccgccagacagatagataaactcttcgtgaccgtgctgtttcacgatgcgaatcataccaggcttaatggcggtgagcagcggtgcgtggccagggtagatccccagttcaccttcgctacccgttacctggattttctcgaccagaccagagaacatttgttgctctgcgctgacgacgtccaggtggtaagtcattgccatatcaccctccgattaaggcgttaaagttttttggctttttccacagcttcttcgatggaaccgaccatgtagaacgcctgctccggcaggtgatcgtattcgccttccatgatgcctttaaagccacggatggtgtctttcagggagacgtatttacccggagaaccggtgaatacttctgccacgaagaacggctgggacaggaagcgctggatcttacgagcacgcgctaccaccagtttgtcttcttcagacagttcatccatacccaggatggcgatgatgtctttcagttcctgataacgttgcaggatggactgaacgccacgcgcggtgtcgtagtgttcctgaccaaccaccagcgggtccagctgacggctggtggagtccagcgggtcaacggccgggtagatacccagagacgcgatctgacggctcagtaccacggttgcgtcaaggtgcgcaaaggtggttgccggagacgggtcagtcaagtcatccgcaggtacgtatactgcctgtacggaggtgatagaaccggttttggtggaggtgatacgttcctgcagaacgcccatctcttccgccagggtcggctgataacctaccgctgaaggcatacggcccagcagtgcggatacttccgtaccggccagggtgtaacgatagatgttgtcaacgaacagcagaacgtcacgaccttcgtcacggaatttctcagccatggtcagaccggtcagagctacgcgcagacggtttcccggcggctcgttcatctggccatacaccagggatactttgtcgataacgttggagtcggtcatttcgtggtagaagtcgttcccctcacgagtacgttcacctacgcccgcaaacacagagtaaccggagtgctcgatcgcgatgttacgaatgagctccatcatgtttacggttttacctacacccgcaccaccgaacagaccaactttaccgcccttagcgaacggacacatcaggtcgataactttgataccggtttccagcagttcctgagagtttgacagctcttcgtaggaaggtgctgcgcggtgaatcgcccaacgctcttcttcaccgatctcgcctttcatgtcgaccggttcacccagtacgttcatgatacggcccagagtcgctttacctaccgggacttcgatcgggtgttcgaggtcttttacatccagaccgcgacgcagaccgtcggaggaacccattgcgatggtacgcacgataccgccgccgagctgctgctgaacttccagcaccagacgctcattaccattttgcacctcaagagcatcgtacacgcgcggtacggcatcctgagggaattcgacgtcaactacggcgccgattacctggacaatctttccagtagccatcttaaatcctctacgaaataacctgtttaaaccgcggcggcccccganacgatctcggtgagttcctgagtaatgctggcctgacgagctttgttgtataccaactgcagctctttaatcaggctgccgccattgtcggtcgcggctttcatcgccaccatacgggcggcctgctcgctggccaggttttcaaccacgccctgataaacctgagattcgacataacgacgcagcagggtatccagcaacgccttcggatcgggttcgtacaggtaatcccaggatttatgtttcagatcatcatcatctgatgccggtaacggcagcagctggctgatggtcggaacctgagacatggtgttaataaatttgttgctgacaatgtaaagcttgtccagacggccttcgtcgtaggcctgcaacatcacttttaccggaccgatcagttcggacagggaagggttatcccccatgccggtgacctgggcaacaacattgccgcccacggagttgaagaacgacacgcctttcgagccgatcattgcgaggtcgcattgaacgcctttgtcggtccaggtcttcatttccgccagcagttttttgaacaggttaatgttcaaaccaccgcacaaaccacggtcggtcgacaccaccaggtagcccacgcgtttaacgtcgcggttttccaggtaagggtgcttatattccagattaccgtgtgcaaggtgaccaatcactttgcgcatggtttctgcataaggacggctggccgccatgcgatcctgcgatttacgcattttggaagcggcgaccatctccatcgctttagtgatcttttgcgtgttctggacgcttgcgatcttactacgtatctcttttgcgccggccatgagcttctcctcaatgccttgcggcctgccctaaggcaagccgccagacgttaccaggattgggttgctttgaaggaatcgaggatgcctttcagcttgccttcgatttcgtcgttgtagccaccggtctggttgatctcttgcatcaacggagcgtgatcacggtcgacgtaagccagcagagcggcttcgaagctgccgattttcgacagttcaacatccgccaggtaaccacgttctgctgcgaacagaaccagagactgctgcgcaacggacatcggcgcatactgtttctgtttcagcagttcggtcactttttgaccgtggtcaagctgcttacgtgttgcatcgtcaaggtcggatgcaaactgagagaacgctgccagttcacgatactgtgccagagcggtacggataccaccggacagttttttcatgatcttggtctgtgctgcaccaccaacacgggatacggaaatacccgggttaaccgcaggacgaataccggcgttgaacaggttggtttccaggaagatctgaccatcggtaatggagattacgttggtcggaacgaacgcagaaacgtcacccgcttgagtttcgataatcggcagcgcggtcagtgaaccggttttccctttcacttcacctttggtgaaagcttcaacgtattcggcgttaacacgcgcagcacgctccagcagacgagagtggaggtagaatacgtcgcccgggaatgcttcacgtcctggcggacgacggagcagcagcgagatctgacggtaagcaacagcctgtttagacagatcatcgtaaatgatcagcgcatcttcaccgcggtcacggaagtattcgcccattgcgcaaccggcatacggtgccaggtattgcagtgcagcggattcagacgcggttgctaccacaacgatggtgttagccagtgcgccgtgctcttccagtttacgtaccacgttagaaatggtggacgctttctggccgatagcgacatagatacatttgataccggaatcgcgctggttgatgatggcatcgatagccagtgcggttttaccggtctgacggtcaccgatgatcaattcacgctgaccacgaccgattgggatcatggagtcaacggctttataaccggtctgtaccggctgatctacggactgacgttcgataacgcccggagcgattgcttctacagcagagaagccgtcgtgatccagcggacctttaccgtcgattggtgcacccagagtgttaaccacacggcccagcaggccacggccaaccggaacttccaggatacggccagtacacttaactttcatgccttcggcaaggtcagcatacggacccataacaaccgcaccaacagagtcgcgctcgaggttcagtgcgatagcgtaacggttacccggcagggagatcatttcaccctgcatacaatcggccaggccgtgaatgcggataacaccgtcacttacagaaacaatagtaccttcgttgtgagcttcactcacaacattgaactgagcaatgcgctgcttgatcagttcgctgatttcggtggaattcagttgcatgctccagtccccttaagactgcaagacgtctgcaaggcgctcaagacgaccgcgtacgctgccatcaatgaccatatcacccgctcggatgataacgcctgccattacagacttatcgattttgcaattcagcttaactttgcgtgacagacgtttttccatcgcagcagaaattttcgcgagctgttgttcactcagtgcggcagcggaaatgacgtctacctcagcggtagcctcactcacggcacgaaggtgaataaactgctccagaacatccgggagcgcgttaagacgaccattttcagccattacccgaataaggttctgaccgttttcgtccagttgctcaccacaaactgcgataaacgactcggcaagcgtttctggcgcaagcgcgccagagagaagctctgccatttgttcgtttttggttacctcggcggcaaacgccagcatgtcctgccagcgttctacactttggtgttcgacggcaaagtcaaaagctgctttggcgtaggggcgagctaccgtaataaattcagacatcagcccctccctccttacagttcagcgacaagtttatccacgatgtcgctgttagcagcttcatccacggaacgttcgatgatcttctcggcgccagcaacagccaggatagcaacttgcttacgcagctcttcacgggcacgtttacgctcggcttcaatttccgcctgcgcctgggccacgattttagtacgttcctgttctgcctcagctttcgcttcgtccagaatctgcgagcggcgtttgttcgcctgctcgatgattacctgggcttccgctttcgcttttttcagctggtcggtcgcgctggcctttgcaaggtcaaggtccttatgtgctcgttctgcggaagcaaggccgtcagcaatttctttttgacgtttttcgatggctgccannnnnnnnngccatacgtacttcatgcagaacagaacgaacaggacaaacgcgatggcctggccgaggattgttgcgttaagattcacagcacaatgcctctatttagttaacgttctgatattgctctttaaataaaagcaacgcttactacgcgacagcgaacatcacgtacagacccagacctacagcgatcatcgggatagcatccaccagacccataacgataaagaactgagtacgcagcagaggaatcagatcaggttgacgcgctgcgccttccaggaatttacccccgaggatgccgataccgatcgcagcaccgattgccgccagacccatcatcacagcggcagccatgtacagcagatccatattcaggttttccatgacagtctccagtttgtttcagttaaaacgtagtagtgttggtaaattaatgttcttcagacgccatcgacagatagacgatcgtcagaaccatgaagatgaaggcttgcagcgtaatgatcaggatgtggaaaatggcccacggcacattcaggatccactgtgaccaccacggcaacagaccagcaatcagaatgaaaatcagctcaccggcatacatgttaccgaacagtcgcaaaccgagtgaaactggtttggacagcaggcttaccccttcaaggattaagttgacaggaatgaacgcccagtgattgaacggctgcagcgtcaactctttcgtgaagccgccgatgcctttcattttgatgctgtagaacagaatcaggataaatacgcccagtgccatagacagcgttacgttcacgtccgcagacggaaccacacgcagtgcaggcagacccagtacatgttcagcaatgtacggcagcaggtcgataggcagtaaatccatcaggttcatcaggaatacccagacgaagatcgtcagggccagcggagcaatcagcttgcttttgccatggtacatgtctttcacgctaccattaacaaagccgatcaccagctcaatcgcggtctgaaacttacctggcacaccgctggtcgcctttttggctacgctacggaataaaaccaggaacaacagacccagcaccaccgagaagaacatggagtcaatattgattgtccagaaggtggctggggggttttgtggatccaccagcgagaatgtacgcaggtccagctgaaggttattcaggtggtgtcctatgtaatcctgcggcgtcatattttctgaagccatgatgccttttaccctttgttgttaattacagccggtgccagtatctgaaccaccagcaccaaaacccacgtaacgatcagcggcaagaataccgcctttaaaaccgccaacgccaccaccagtaacaccaacatcgccagaactttgaaagcttcaccaaatgcgaatgtccaggccacccggcctttcgctggtgtatgcgcctggtgacgccaggcaaatatcataaacaaaacgttaggcagaaagactgccaggcccccgcttattgcagagacgccccagaaggggtctttgaggctgaacagcaatccacttgctatcaccaccagtaactgaacgagcagaagcttccgagcaacgtttcgactcacgagcgacacagacatcacgtttttcactcctgctcccttcgaggtatgccgcgtgtcgtataaaactttctttaaggcttagagtcaagcatcaaaaagcggtcaaattatacggtgcgcccccgtgatttcaaacaataagtagccaaaaggtgaataaatgtttaaatatttttccagtgcatacaattgcgacttttctactaaccctgttcgatcatgaaaaactgtaaataacgcgtaaacactggtgataaagcgtgcttcagatcacatattgcgcatgttcgcgcacagcatatttatttacttggcaaatgatgcctttgcaagtttatgatatttcagtctaaaaacagatactgtnnnnntaaatgacatttacacaacaaaaaccacccattgacatttttaataatgttttaacagccaatgatggttcttagcgccgatttttagcagactgatattttcactaatgacttattttctgcttaccaaaaaaagccacgttatcttgttgatgcaaaagagtgaacgtggcgttaaatgtaaccagttatatcagtagaaaacctggttgttgttaacagtctaaccggtcaattttttannatnnnnnnnntannaattaaattttatttgctttaatcaccaccagatgacgttcgccatccagggctggaacctgaagtttaaccactgattcgacctgatattcttcgggcaacaaagcgatttcatcttccggcatttgccctttcagcgcgtagaaacggccttgctcaccaggaagatggtggcaccagctcaccatatcgttcagagaggcaaaagcgcggctaattacgccatcaaatggcggctctgaaggaaactcttctaccctgctctgtactggctcaatattctccagtttaagctcatgttgcacctgacgaaggaaacgcacgcgtttaccaaggctatccaacagagtgaaatgggcttcaggacgcacgatagagagtggaatgccaggcagtccaggaccggtgccgacatcgataaaccgttcaccttgcagatacggtgccaccacaatgctatcgagaatatggcgtaccagcatctcattaggatcgcggaccgaagtcaggttgtacgctttgttccatttatgcagcatattcacgtaggcaataagctggtttttctggtgatcggtaagcgaaatacctgcgtctttcagcagtaaggagagtttgttgagcacggtgattacctgttcttgatgcgttgcctggtaagcgggtgcttaccaggcatttttaatgcgttatgcgctacgacgcagcataccctgttttttcagccacaccagcagaatggagatggccgcaggcgtgacgccagaaatacgtgaagcctggccgatagaggccggtttgtgatcgttaagtttggcgatcacttcgttagaaagaccggatacctggcggtaatccagtgtcgcgggtagcaaggtgttctcgttacgcagctgcttttcgatctcatcttgctggcgcgcgatataaccttcgtatttaacctgaatctcaacctgttccgccgcctgttcgtctgtcaacgcaggggcaaacggcgtcagcgtggttaatttttcataagtcatttccggacgacgcagcagatcttcaccactggcttcacgggaaagcggcgcagtcaggtgagcattcacttcggctgcagcttccgccgacggggttacccaggtcgatttcagacgctgacgctcacgctcgatattctcaagtttctcgttaaagcgcgcccaacgttcgtcatccaccaggcccagttcacgaccgatttcagtcaaacgcagatccgcattatcttcgcgcagcatcagacgatattctgcgcgcgaggtaaacatacgatacggttctttggttcctaaagtgcacaggtcatcaaccagtacgccgagataggcctgagaacgcgccggagcccaaccttctttgtcatcagacagacgggcagcgttaagaccggccagcaaaccttgcgcagcggcttcttcgtaaccggtagtgccgttaatctgaccagcaaagaacagcccctggataaacttgctctccagcgtcggtttcaggtcgcgaggatcgaagaagtcatactcaatggcataacccggacgcacgatcttcgcgttttccatcccctgcatagagcggacgatttgcatctgcacatcgaacggcaggctggtggagataccgttcggataaatttcgttagaagtcagcccttccggttcaaggaagatctgatgctgatttctgtcggcgaagcgcatgactttgtcttcgatcgacgggcagtagcgtgggccgacaccttcgatcacccctgcgtacattgggctacgatcgaggttactgcggatcacatcatgggttttctcgttggtatgggtgatataacacggcacctgctgtggatgctgggacgcattgcccataaaagagaataccggcattgggttatcgccatgctgttgcgcaagcacgctaaagtcgatggttcgagcatcaatacgcggtggtgtcccggttttcagacgaccaacgcgcagcggaagttcacgcaaacggcgagaaagcggaatggacggcggatcaccagcacggccaccgctgtagttatccagaccgatatgaattttaccgtcgaggaacgtcccaacggtgagcacgacggctttggcacggaacttcagtcccatttgggtaacagcaccgaccacacgatcgttttcgacaataagatcttcaaccgcctgctggaagatcatcaggttcggttggttctccagcgccgtacgtaccgcctgacggtagagcacacgatccgcctgagctcgggtagcgcgaactgccggtcccttgcttgcgtttagtatcctaaactggatacccgcctgatcgatcgctttcgccatcagaccgccgagtgcatccacttcttttaccagatgtcccttcccaataccgccgatcgccgggttgcagctcatctgccccagagtgtcgatattgtgtgtcaaaagcagagtctgttgacccatacgcgccgcagccatcgcggcctcggtgcctgcatgacccccgccaatgatgatgacgtcaaaaggatccggataaaacatggtgattgcctcgcataacgcggtatgaaaatggattgaagcccgggccgtggattctactcaactttgtcggcttgagaaagacctgggatcctgggtattaaaaagaagatctatttatttagagatctgttctattgtgatctcttattaggatcgcactgccctgtggataacaaggatccggcttttaagatcaacaacctggaaaggatcattaactgtgaatgatcggtgatcctggaccgtataagctgggatcagaatgaggggttatacacaactcaaaaactgaacaacggttgttctttggataactaccggttgatccaagcttcctgacagagttatccacagtagatcgcacgatctgtatacttatttgagtaaattaatccacgatcccagccattcttctgccggatcttccggaatgtcgtgatcaagaatgttgatcttcagtgtttcgcccgtctgttttgcaccggaatttttgagttcagcctcgagtttatcgatagccccacaaaatgtgtcatattcacgactaccaataccgattgcgccaaagcggaccgcagaaagatcgggcttctgttcctgcaatgcttcatagaaaggagaaaggttgtccggaatatctccggcaccgtgggtggagctgataaccagccagatccccgaggcagataaatcttccaacagcggaccgtgcagcgtttcggtggtaaaacccgcctcttccagcttttcagccaggtgttctgctacatattcggcaccgccgagggtgctgccgctgataagagttatatctgccataaaccgccacctttattaagagtggcgtattgtacgctgtgaacgcgttgggatctacctgtggaaaagtatgggattaaaaaagccgatcagggcttgatggtacgcatgatcgggttctgcaggacgatcagtgtctcggtggactgaatttcatcaattgtttggatcttgttgataagtacatgctggagagcatcgatcgaacggcacatcacttttataaagatgctgtagtggccggtggtgtagtacgcctcggtcacttcatcgaggctttccagctttgccagcgcggaagggtagtctttggcgctctttaatataatgccgataaagcagcctacgtcataaccgagctgcttcgggctgacatcaatacgcgccccggtaatgatccccgcctgcttcattttctctactcgaacgtgaatcgtccccggactgacgccaaattgtttcgccagttcggcgtaagcggtgcgcgcattgcccattaatgcttccaggatgccacggtccagattgtcgatcagataattttccataggattttcttatgcggattgatgattcattctattttagccttcttttttaatgaatcaaaagtgagttaggctttttattgaatgattattgcatgtgtgtcggtttttgttgcttaatcataagcaacaggacgcaggagtataaaaaatgaaaaccgcttacattgccaaacaacgccaaattagcttcgtgaaatctcacttttctcgtcaactggaagaacgtctggggctgatcgaagtccaggcgccgattcttagccgtgtgggggatggcacgcaggataacttgtcgggctgtgaaaaagcggtacaggtaaaagtgaaagctctgcctgatgcccagttcgaagtggttcattcactggcgaagtggaaacgtcagaccttagggcaacacgacttcagcgcgggcgaagggctgtacacgcacatgaaagcccttcgccccgatgaagaccgtctttctccgttgcactcggtctatgttgaccagtgggactgggaacgcgtaatgggcgacggtgagcgtcaattctcgactctgaaaagcacggtagaggcgatttgggcgggaattaaagcaaccgaagctgcggttagcgaagagtttggcctggcaccgttcctgccggatcagatccacttcgtacacagccaggagttactgtctcgttatccggatcttgatgccaaagggcgtgagcgggcgatagcgaaagatcttggtgcggtattccttgtcgggattggcggcaagctgagcgatggtcatcgccacgacgtgcgcgcaccggattatgatgactggagcaccccgtcagagctgggccatgcgggtctgaacggcgatattctggtgtggaaccctgtactggaagatgcgtttgagctttcttccatggggatccgcgtggatgccgacacgttgaagcatcagttggcgctgaccggtgatgaagatcgtctgcagctggaatggcatcaggcgttgctgcgcggtgaaatgccgcagaccatcggcggcggtatcggccagtctcgtttgaccatgctgctgctgcaactgccgcatatcggccaggtccagtgtggagtatggccagctgctgttcgcgagagcgtcccttctctgctgtaataatttatcgccgccagcgtctgagcaggcggcttcgcatcccggtatcaaagcgccagatatgatcgaaaatgcgcatgatgccgggtttgccgtgtgccgacatcgccacggcatgaaagcgatgctgatgtacccgctgcagctctttcactttactcgtcacgtcgtcaggcaaccgctgggcgataaaatcagaaatcaccaccgcatcggcatcaaaccattccctgctttgcaagcgttccataatggcgcgaaaacaactggcaagatcggtgccgccacgaaactgctggcttaaaaaacggattgcttgttcgatgccttgtgggcctgaaagctcataacggacgatctcggtggaaaatagcataatataacagcgccggttttcagcgagagcaatgcgcatcaaagccaggcagaacgctttcgcacactgttcattaaagccgcccattgagccggaagtatccacgcagacaataaacggtccgcgcggctgttcgtcgtaatctttatgcaccaccgggcgttcgatcactttttcacgccacgactcaccgtgcaggcgataggtgagcaactgtttttccaccagccgacggtaaaactcatactccagttccgttatccctagtgtcgccagttctggcggcagaagacgtaaaatatcatcgctttgttgcagaccatcaacctgctcaggaaccgtcgccggttcgcgcaccatggtgcggaaggtttccatctgcgcatcgttgcgcggtattgatttggcttcccgggaacgccccagttgttctgccaggcgtttcagttccggctgttcgttaagaaattcaccgtatttcacaatcaactgatagtcgccacgtttaagctgaccggcgctcatatcccacagacgaccagctgcggtattgttatctgcgagaatcggttcaagttgtccgctcagcgtcatgcgttcctgaacttcactcaacagttgttcgcgttcttcttctaatagctgttgatttaacgtcgttgcttgcacgatcagacttaaacgccagcgctggagaaaaagcgtgtgtaacgctgaagtgatcgtgctgttagcatcgaccaactgtcgggcttgttctgcccatggggaattcagacgatgcagtaagtccaggatctgtggtagctgcacaataaactgcggcgtggagaggagctggctttgctgatagcacatcacctcttcggtgagttccggcgggactcgggcatctttcagccgactgcgcagcgcctcacgccagcggggaacatcatcagtgattgccgccttcagtcgtgggaatttttcaaagaagactgccagctgcggtgaggccagcagcgcgatgatcatctcttcgatcaatccctcttcgctgacggccagcatcacattaagcgtatccagcgttagcattgttgtgcctggcgaatctgtgcgccgacatcctgtaggctggcttcaatgcgacctaaccagtcgccagggataaacagacatctttgctgttcgctgaataaagcgtgttgcttgcgccagtcgctttcaagctcttccaattgttgttttatttcacctggcagaccttcagccgatgaaccgggaagtgccagcgtactgccttgtaaacttacatcgcgtacaacaagatgttgggcgctatcaacttccagattcagtttctgggcaaagccgataccgttcagtttgccgcgaatttcaccacctttgctcagccactgttccagcgcgctacgctcaaaggagatatgaaccacttccatattatgcaattttaacggtttttgcagcagcagagtcagagtggaagcagtaacgttaacaggaagttgatactgctgacgacggctgaaaatgccgcccagacgaattaccgttaaggctgttttatcgctttgttgctgctggagttgcaggtgacgttgcacaatcgcgcccaggcgggtcaacatcccttgctgttgccaggcatgaccggtcatcaatacatcaatttgttgttgtatcaaattcaggctttgcgcgtcataccacaggcaatctttcagcaaaatgagatctaccggggcaacagcactgcgaccgctaaaaaaggcgctggcctgcaataatcgaatcgcttttttccagcgacgatccgagacataaggcgcatccggtaatttatccagttgctggcgcagcataaaaatcagctcaaatacatgatcgggcagcgtaatttcaccaatctctttctgccagcgttcatattcttcatctgtgacctgcaaggaggctggaaccggattgtcattttcatcctgttgactggtcagcatggagcggaaattcgctttatcctgcactttatctaaccacagacgaatcagcatgcggtcatataacgcttccagactgctgtctgcttccggcagctcgttggaggccgccaccagcaggcgcatcgggattttttctacgtgtgcaccgttgcggaactggcgctcgttaatggcggtgagcagggtattaagaattgccggacccgctttccagatctcatccagaaagacgatttctgcttccggcaggtaaccgctggttaaacgttcatagcgcccttcatcttttagcgcctgaatagaaaggggaccaaaaacttcttccggcgtggagaagcgggtcatcagatattcaaacgcgcgggcattctgaaaggcgaattttaagcgccgggcgatcaaacttttggcaatacctggcgggccaaggaggaacacactttcaccacttaatgccgctaataaacacaagcggatggcgtggctacgttcataaagcaccttttccaacgaactgctcaggcgggaaattctttccgctaataaatgagggtgagccataatgaagtggcgtcctttcgtcaaaagttctgcgtaaattgcgagtatagacgtttcttgctggtggctaaaatagtctcaaaggggggggatttttctttgagccaggttaatgtggccgcatttaggagtacgattttgccgttaatcgtgcatactgtgcgcttttttgtgnnnnaagggactaagcacacatttcatatttcaacgaaagactagtctatgagcactgataataagcaatcattgcccgcgattaccctcgcggcgattggagttgtctacggcgatattggtaccagcccgttatatacacttcgtgaatgtttgtccggccagtttggttttggcgttgaacgcgatgccgtgtttggctttttatcgctgatcttctggctgctaatctttgtggtttccattaaatatctcaccttcgtgatgcgggcagataacgccggtgaaggggggatcctgacgttgatgtcgcttgccgggcgtaatacgtcggcgcgaaccacatcaatgctggtgattatggggctaatcggcggcagctttttctatggtgaagtcgtcataacacccgctatttcggtgatgtcagccattgaaggtctggaaatcgtcgccccgcagctggatacctggatagttcccctctcaattatcgttctcactttattatttatgattcaaaagcatggcacggctatggtcggtaagctgtttgcgccgatcatgctgacctggtttttgattctggcaggactggggttacgtagcattattgctaaccaggaagtgctgtatgcgctgaatccgatgtgggcggtgcatttcttccttgaatacaaaacggtttcttttattgcattaggggcagtggtgctgtcgattacgggggtcgaggcgctgtatgctgatatggggcactttggtaagttccctattcgcctggcgtggttcaccgtcgtattaccttccttgacccttaattacttcggtcagggagcgctgttgttaaagaatccggaagcgattaagaacccgttcttccttttggcaccggactgggcgctgatcccgctgctgatcatcgccgcactggcgacggtaatcgcctcgcaggcggttatctctggcgtcttttcattgacgcgtcaggcggtacgtctgggatatttgtcgccgatgcgcattattcacacctccgaaatggagtcagggcaaatctatattccgtttgtgaactggatgctctatgtcgcggtcgtgattgtgattgtcagctttgagcactccagcaacctggcggcggcgtacgggattgcggtgaccggaaccatggtgctgacgtctattctctcgactaccgtggcacgtcagaactggcactggaataagtattttgttgcgctgatcttgattgctttcctttgtgtcgatattccattgttcaccgctaacctcgataaactgctctccggcggctggttgccattgagcctcggtacggtgatgtttatcgtgatgaccacctggaagagtgagcgtttccgcttgctgcggcggatgcatgaacatggtaactctctggaagcgatgattgcttcgctggagaaatcaccgcctgttcgcgtgcccgggaccgcggtatatatgtcgcgtgcaatcaacgtcattccctttgcgctgatgcataaccttaaacataacaaggtattgcatgagcgggtgattctgttaactctgcgcaccgaagacgctccatatgtccataacgtccgtcgggtacagattgaacaactgtcgcccactttctggcgcgtggtggcaagttatggttggcgagaaacgccaaacgtggaagaagttttccaccgctgcggtctggaaggattaagttgccggatgatggaaacctccttctttatgtcgcatgagtcgttgatcctcggcaaacgcccgtggtatttgcgtctgcgcggcaagctgtacttgctgctgcaacgtaatgcgctgcgtgcaccagatcaatttgaaatcccgccaaacagggttatcgaactgggtactcaggtcgaaatctaacgccagacgcctcctttcttcataagggggcgtttttgttttcatggttaatcaccatgtaaaacgtttcgaggttgatcacatttccgtaacgtcacgatggttttcccaactcagtcaggattaaactgcgggtcagcgaaacgtttcgctgatggagaaaaaaatgaaaaaaggcaccgttcttaattctgatatttcatcggtgatctcccgtctgggacataccgatacgctggtggtgtgtgatgctggtttacccatccccaaaagtacaacgcgtatcgatatggcattaacccagggtgtaccttcttttatgcaggtgctgggcgtcgtcacaaatgaaatgcaggtcgaggctgccattatcgcggaagagatcaaacaccataatccgcaactccacgaaacgttgctcactcaccttgagcagctgcaaaaacaccagggaaataccattgaaattcgttacaccacgcatgaacaattcaaacaacaaaccgcagaaagtcaggcggtaattcgcagcggagaatgttctccgtatgcgaatatcattctctgtgctggcgtgacgttctgaggccgtcatggaagcattacttcagcttaaaggcatcgataaagccttcccgggcgtaaaagccctctcgggcgcagcgttaaatgtctatccgggccgcgtgatggcgctggtgggcgaaaacggcgcgggtaaatccaccatgatgaaagtgcttactggcatctatactcgcgatgccggtacgcttttatggctggggaaagaaacgacatttaccgggccgaaatcttcccaggaagccgggattgggattatccatcaggaactgaacctgatcccgcagttaaccattgccgaaaacattttcctcggtcgtgagtttgttaatcgctttggcaaaattgactggaaaaccatgtatgccgaagcggataaattgctggctaaacttaacctgcncttnnaaagcgacaagctggtgggcgatctttccatcggtgaccagcaaatggttgaaatagccaaagtgctgagctttgagtcgaaagtcatcattatggatgaaccgaccgatgcgctgaccgataccgaaaccgaatccctgttccgcgtcatccgcgagctgaaatcgcaaggccgcggtattgtctatatctcccaccgcatgaaagaaatcttcgagatttgcgatgacgttaccgtttttcgtgacggacaatttattgctgagcgcgaagtggcatcactgaccgaagattcgctgattgagatgatggtgggtcgcaagctggaagatcaatatccgcacctggacaaagcgccgggagatatccgcctgaaagtcgataatctctgcggacctggcgttaacgatgtctcttttactttacgcaaaggcgaaattcttggcgtctctggtttgatgggcgcaggtcgtaccgaactgatgaaagtgctctacggcgcactaccgcgcaccagcggttacgtcaccctggatgggcatgaagtcgttacccgttcaccgcaggatggcctggcaaacggcattgtgtatatctccgaagaccgtaaacgtgacggtttagtgttgggcatgtcagtaaaagagaacatgtcgctgacagcgctgcgctacttcagccgcgctggcggcagtttgaagcatgccgatgaacagcaggctgtgagtgattttattcgcctgttcaatgtgaaaacgccgtcgatggagcaggcaattggtctgctttccggtggcaatcagcaaaaagtggcgattgcccgcggtctgatgacacgccccaaagtgttgatccttgatgaacctacccgtggcgtagatgtcggngcgaaaaaagagatctatcaactgattaaccagttcaaagccgatggcttgagcatcattctggtgtcatcggagatgccagaagtattaggcatgagcgatcgcatcatcgtcatgcatgaagggcatctcagcggggaatttactcgtgagcaggccacccaggaagtgttaatggctgccgctgtgggcaagcttaatcgcgtgaatcaggagtaaaaaaatgacaacccagactgtctctggtcgccgttatttcacgaaagcgtggctgatggagcagaaatcgcttatcgctctgctggtgctgatcgcgattgtctcgacgttaagcccgaactttttcaccatcaataacttattcaatattctccagcaaacctcagtgaacgccattatggcggtcgggatgacgctggtgatcctgacgtcgggcatcgacttgtcggtaggttctctgttggcgctaaccggcgcagttgctgcatctatcgtcggcattgaagtcaatgcgctggtggctgtcgctgccgctctcgcgttaggtgccgcaattggtgcggtaaccggagtgattgtagcgaaaggtcgcgtccaggcgtttatcgctacgctggttatgatgcttttactgcgcggcgtgaccatggtttataccaacggtagcccagtgaataccggctttactgagaacgccgatctgtttggctggtttggtattggtcgtccgctgggcgtaccgacgccagtctggatcatggggattgtcttcctcgcggcctggtacatgctgcatcacacgcgtctggggcgttacatctacncgctgggcggcaacgaagcggcaacgcgtctttctggtatcaacgtcaataaaatcaaaatcatcgtctattctctttgtggtctgctggcatcactggccgggatcattgaagtggcgcgtctctcctccgcacaacccacggcggggactggctatgagctggatgctattgctgcggtggttctgggcggtacgagtctggcgggcggaaaaggtcgcattgttgggacgttgatcggcgcattaattcttggcttccttaataatggattgaatttgttaggtgtttcctcctattaccagatgatcgtcaaagcggtggtgattttgctggcggtgctggtagacaacaaaaagcagtaataacgactacaggacatcttgaatatgaacatgaaaaaactggctaccctggtttccgctgttgcgctaagcgccaccgtcagtgcgaatgcgatggcaaaagacaccatcgcgctggtggtctccacgcttaacaacccgttctttgtatcgctgaaagatggcgcgcagaaagaggcggataaacttggctataacctggtggtgctggactcccagaacaacccggcgaaagagctggcgaacgtgcaggacttaaccgttcgcggcaccaaaattctgctgattaacccgaccgactccgacgcagtaggtaatgctgtgaagatggctaaccaggcgaacatcccggttatcactcttgaccgccaggcaacgaaaggtgaagtggtgagccacattgcttctgataacgtactgggtggcaaaatcgccggtgattacatcgcgaagaaagcgggtgaaggtgccaaagttatcgagctgcaaggcattgctggtacatccgcagcccgtgaacgtggcgaaggcttccagcaggccgttgctgctcacaagtttaatgttcttgccagccagccagcagattttgatcgcaccaaaggtttgaacgtaatgcagaacctgttgaccgctcatccggatgttcaggctgtattcgcgcagaatgatgaaatggcgctgggcgcgctgcgcgcactgcaaactgccggtaaatcggatgtgatggtcgtcggatttgacggtacaccggatggcgaaaaagcggtgaatgatggcaaactagcagcgactatcgctcagctacccgatcagattggcgcgaaaggcgttgaaaccgcagataaagtgctgaaaggcgagaaagttcaggctaagtatccggttgatctgaaactggttgttaagcagtagttttaatcaggttgtatgacctgatggtgacataaatacgtcatcgacagatgaacgtgtaatataaagaaaagcagggcacgcgccaccctaacacggtggcgcattttatggacatcccgaatatgcaaaacgcaggcagcctcgttgttcttggcagcattaatgctgaccacattcttaatcttcaatcttttcctactccaggcgaaaccgtaaccggtaaccactatcaggttgcatttggcggcaaaggcgcgaatcaggctgtggctgctgggcgtagcggtgcgaatatcgcgtttattgcctgtactggcgatgacagcattggcgagagcgttcgccagcagctcgccactgataacatcgatattactccggtcagcgtgatcaaaggcgaatcaacaggtgtggcgctgatttttgttaatggcgaaggtgagaatgtcatcggtattcatgccggcgctaatgctgccctttccccggcgctggtggaagcgcaacgtgagcgtattgccaacgcgtcagcattattaatgcagctggaatcaccactcgaaagtgtgatggcagcggcgaaaatcgcccatcaaaataagactgtcgttgcgcttaacccggctccggctcgcgaacttcctgacgaactgctggcgctggtggacattattacgccaaacgaaacggaagcagaaaagctcaccggtattcgtgttgaaaatgatgaagatgcagcgaaggcggcgcaggtactgcatgaaaaaggtatccgtactgtactgattactttaggaagtcgtggtgtatgggctagcgtgaatggtgaaggtcagcgcgttcctggattccgggtgcaggctgtcgataccattgctgccggagatacctttaacggcgcgttaatcacggcgttgctggaagaaaaaccattgccagaggcgattcggtttgcccatgctgccgctgcgattgccgtaacacgtaaaggcgcacaaccttccgtaccgtggcgtgaagagatcgacgcatttttagacaggcagaggtgacgcttggctacaatgaaagatgttgcccgcctggcgggcgtttctacctcaacagtttctcacgttatcaataaagatcgcttcgtcagtgaagcgattaccgccaaagttgaagcggcgattaaagaactcaattacgcgccatcagctctggcgcgtagcctcaaactcaatcaaacacataccattggcatgttgatcactgccagtaccaatcctttctattcagaactggtgcgtggcgttgaacgcagctgcttcgaacgcggttatagtctcgtcctttgcaataccgaaggcgatgaacagcggatgaatcgcaatctggaaacgctgatgcaaaaacgcgttgatggcttgctgttactgtgcaccgaaacgcatcaaccttcgcgtgaaatcatgcaacgttatccgacagtgcctactgtgatgatggactgggctccgttcgatggcgacagcgatcttattcaggataactcgttgctgggcggagacttagcaacgcaatatctgatcgataaaggtcatacccgtatcgcctgtattaccggcccgctggataaaactccggcgcgcctgcggttggaaggttatcgggcggcgatgaaacgtgcgggtctcaacattcctgatggctatgaagtcactggtgattttgaatttaacggcgggtttgacgctatgcgccaactgctatcacatccgctgcgtcctcaggccgtctttaccggaaatgaagctatggctgttggcgtttaccaggcgttatatcaggcagagttacaggttccgcaggatatcgcggtgattggctatgacgatatcgaactggcaagctttatgacgccaccattaaccacgatccatcaaccaaaagatgaactgggggagctggcgattgatgtactcatccatcggataacccagccgacccttcagcaacaacgattacaacttactccgattctgatggaacgtggttcggcttagatttacgctgtcttttgatcaaattattaccatcggttgttttcagaagcatgaacattgctgctgaagcaacagtaataatgcccattgtgataaacgtatagtggaattgttcgacagtcgttgtgccttccattccttcataaacgcgaaggacggccgcacttacagctacgcctaaactgatagacagttgctgcgtgaccgccagaacactgttaccgctgctggcgttgtcatcggtcagatcggcaagtgtgatggtattcatcgcggtaaactgcgtcgacatagccatccctaatataaacaacggcaagatcagcatccatattgccattgccggtgattgcaaagagaactgagcgatcattagcccaataatcaccgtgatccccactaatgtatggcgatagcccagacgacgtaagacttgggtaaccatcgattttgcaataatggaacctaacgctgtcggtgccatcatacagccagcaataaacgcctgataaccaaatcctacctgtaacattaatggcataaggaacggtacacagccggtccccagacgggttgcaatattgcctacgataccgatcgagaaagtgcgggttttaaataaatctaatgaaattaatgggtttggcgtgcgtcgtgcatggagaatatagagaagcagtaacccgatgctggtgacaattaccgtcaaggcaatccagctggcgacaatcttttccccgaatagctctattccgcttgagaagagaacaaggctgaggccaaacagcaaaaagccagtgatatcgaatctgcgtcgtgcggtggtgaaattgggcatatgtttgcgcgcgtaaagaaggcccgcaatacctatggggatattgattaaaaatatccagtgccaggttgcccaggtgaccagcacgccgccaagnnnnnnnnnnaaaattggccccaccagacccggcatggcgacaaaattcaatactggaagaagttcattacgaggataagcgcgcagtaaggccagccgagcaacaggcatcatcattgcgccgcctatcccctgaataacccggaagacaaccagctgtggtagcgaattagaaagtgcgcaggccagagaacccaatgtgaacagactcacggcaagggtaaaaatgcgacgcgtaccgaagcgatcggctagccatccgcttaccggaataagcatcgccaccgtcagcgtataactgatgatggctgattgcatcgcgagaggagaacgattaaggctatgagcgattgcgggtaaggcggtattcagaatagtggcatcaagtgcctgcatgaagaaggccatcgccgcgatccacggcaaacccgccatactgcgcttctttttatcgctcattcaatgtcctgttatcgggttatcacttatcaggtgagcgtagcagcgcctgacaagctttaaatgccgcatcgccatcgctttggataatcgcatcgactatcgcctgatgcagatccagctttatcactgtgtcgctggtaattgacgtgaagtaagtgtgataaaccgaatggaatagcgaggcgaatgaggtcaaaaacggattggcgctcatttcatagatatgctcatgccaggccatatcgacttcgatccagcgttcacggcgaaagttctcttttaatgccgccatttcggccattaacgtattgagatgcgctttctgttccgcggtgccaaccgttgctgccagtaggcaagcttgtggctccagacagatacgcataaccagaaagtgatcgatgacctgatgaaagttctcttctgtcatccaccaggtaagcaattcctgatcaagaaaattccagttcgattgtggcatgacccgggtaccaattcgcggtcgcggtaaaaccatcccttttgccgttaacgttttgaccgcttcgcgtaccgctgtacgactcactccaaattgctcgcccagctcaatctcaccgggcaaaatggtgccgggttcatattcaccttttaagatccgttgcgccagcttctcagccagaacatacgaaaggtttttctgtgcagctaactgttgtgcgcttaaaggcattactaatcttcctttttctttttattcctccttagtatgccactaggaagtgtgattacggttgcaaaaacggcaaattgcttgttttatggcacattaacggggcttttgctgaaaaaatgcgcggtcagaaaattattttaaatttcctcttgtcagaccggaataactccctataatgcgccaccactgacacggaacaacggcaagcacgccgccgggtcagcggggttctcctgagaattccggcagagaaagcaaaaataaatgcttgactctgtagcgggaaagtgtattatgcacaccccgcgccgctgagaaaaagcgaagcggcactgctctttaacaatttatcagacaatctgtgtgggcactcgaagatacggattcttaacgtcgcaagacgaaaaatgaataccaagtctcaagagtgaacacgtaattcattacgaagtttaattctttgagcatcaaacttttaaattgaagagtttgatcatggctcagattgaacgctggcggcaggcctaacacatgcaagtcgaacggtaacaggaagaagcttgcttctttgctgacgagtggcggacgggtgagtaatgtctgggaaactgcctgatggagggggataactactggaaacggtagctaataccgcataacgtcgcaagaccaaagaggggggaccttcgggcctcttgccatcggatgtgcccagatgggattagctagtaggtggggtaacggctcacctaggcgacgatccctagctggtctgagaggatgaccagccacactggaactgagacacggtccagactcctacgggaggcagcagtggggaatattgcacaatgggcgcaagcctgatgcagccatgccgcgtgtatgaagaannnnnnnnnnnnnnnnnnnnnnnnnnnngnnaggnngagtaaagttaatacctttgnnnctcattgacgttacccgcagaagaagcaccggctaactccgtgccagcagccgcggtaatacggagggtgcaagcgttaatcggaattactgggcgtaaagcgcacgcaggcggtttgttaagtcagatgtgaaatccccgggctcaacctgggaactgcatctgatactggcaagcttgagtctcgtagaggggggtagaattccaggtgtagcggtgaaatgcgtagagatctggaggaataccggtggcgaaggcggccccctggacgaagactgacgctcaggtgcgaaagcgtggggagcaaacaggattagataccctggtagtccacgccgtaaacgatgtcgacttggaggttgtgcccttgaggcgtggcttccggagctaacgcgntaagtcgaccgcctggggagtacggccgcaagttaaaactcaaatgaattgacgggggcccgcacaagcggtggagcatgtggtttaattcgatgcaacgcgaagaaccttacctggtcttgacatccacagaactttccagagatggattggtgccttcgggaactgtgagacaggtgctgcatggctgtcgtcagctcgtgttgtgaaatgttgggttaagtcccgcaacgagcgcaacccttatcctttgttgccagcggtccggccgggaactcaaaggagactgccagtgataaactggaggaaggtggggatgacgtcaagtcatcatggcccttacgaccagggctacacacgtgctacaatggcgcatacaaagagaagcgacctcgcgagagnnnncggacctcataaagtgcgtcgtagtccggattggagtctgcaactcgactccatgaagtcggaatcgctagtaatcgtggatcagaatgccacggtgaatacgttcccgggccttgtacacaccgcccgtcacaccatgggagtgggttgcaaaagaagtaggtagcttaaccttcgggagggcgcttaccactttgtgattcatgactggggtgaagtcgtaacaaggtaaccgtaggggaacctgcggttggatcacctccttaccttaaagaagcgttctttgcagtgctcacacagattgtctgatagaaagtgaaaagcaaggcgtcttgcgaagcagactganacgtccccttcgtctagaggcccaggacaccgccctttcacggcggtaacaggggttcgaatcccctaggggacgccacttgctggtttgtgagtgaaagtcgccgaccttaatatctcaaaactcatcttcgggtgatgtttgagatatttgctctttaaaaatctggatcaagctgaaaattgaaacactgaacaacganagttgttcgtgagtctctcaaattttcgcaacangatgatgaatcgaaagaaacatcttcgggttgtgaggttaagcgactaagcgtacacggtggatgccctggcagtcagaggcgatgaaggacgtgctaatctgcgataagcgtcggtaaggtgatatgaaccnttataaccggcgatttccgaatggggaaacccagtgtgtttcgacacactatcattaactgaatccataggtnnnnnnnncgnnccgggggaactgaaacatctaagtaccccgaggaaaagaaatcaaccgagattcccccagnnnnggcgagcgaacggggaggagcccagagcctgaatcagtgtgtgtgttagtggaagcgtctggaaaggcgcgcgatacagggtgnnagccccgtacacaaaaatgcacatgctgtgagctcgatgagtagggcgggacacgtggtatcctgtctgaatatggggggaccatcctccaaggctaaatactcctgactgaccgatagtgaaccagtaccgtgagggaaaggcgaaaagaaccccggcgaggggagtgaaaaagaacctgaaaccgtgtacgtacaagcagtgggagcacagagcaatctgtgtgactgcgtaccttttgtataatgggtcagcgacttatattctgtagcaaggttaaccgaatagggganncgaagggaaaccgagtcttaactgggcgttaagttgnnnggtatagacccgaaacccggtgatctagccatgggcaggttgaaggttgggtaacactaactggaggaccgaaccgactaatgttgaaaaattagcggatgacttgtggctgggggtgaaaggccaatcaaaccgggagatagctggttctccccgaaagctatttaggtagcgcctcgtgaattcatctccgggggtagagcactgtttcggcaagggggtcatcccgacttaccaacccgatgcaaactgcgaataccggagaatgttatcacgggagacacacggcgggtgctaacgtccgtcgtgaagagggaaacaacccagaccgccagctaaggtcccaaagtcatggttaagtgggaaacgatgtgggaaggcccagacagccaggatgttggcttagaagcagccatcatttaaagaaagcgtaatagctcactggtcgagtcggcctgcgcggaagatgtaacggggctaaaccatgcaccgaagctgcggcagcgacactgtgtgttgttgggtaggggagcgttctgtaagcctgtgaaggtgtgctgtgaggcatgctggaggtatcagaagtgcgaatgctgacataagtaacgataaagcgggtgaaaagcccgctcgccggaagaccaagggttcctgtccaacgttaatcggggcagggtgagtcgacccctaaggcgaggccgaaaggcgtagtcgatgggaaacaggttaatattcctgtacttggtgttactgcgaaggggggacggagaaggctatgttggccgggcgacggttgtcccggtttaagcgtgtaggctggttttccaggcaaatccggaaaatcaaggctgaggcgtgatgacgaggcactacggtgctgaagcaacaaatgccctgcttccaggaaaagcctctaagcatcaggtaacatcaaatcgtaccccaaaccgacacaggtggtcaggtagagaataccaaggcgcttgagagaactcgggtgaaggaactaggcaaaatggtgccgtaacttcgggagaaggcacgctgatatgtaggtgaagtccctcgcggatggagctgaaatcagtcgaagataccagctggctgcaactgtttattaaaaacacagcactgtgcaaacacgaaagtggacgtatacggtgtgacgcctgcccggtgccggaaggttaattgatggggtcagcgcaagcgaagctcttgatcgaagccccggtaaacggcggccgtaactataacggtcctaaggtagcgaaattccttgtcgggtaagttccgacctgcacgaatggcgtaatgatggccaggctgtctccacccgagactcagtgaaattgaactcgctgtgaagatgcagtgtacccgcggcaagacggaaagaccccgtgaacctttactatagcttgacactgaacattgagccttgatgtgtaggataggtgggaggctttgaagtgtggacgccagtctgcatggagccgaccttgaaataccaccctttaatgtttgatgttctaacgtggacccgtgatccgggttgcggacagtgtctggtgggtagtttgactggggcggtctcctcctaaagagtaacggaggagcacgaaggttggctaatcctggtcggacatcaggaggttagtgcaatggcataagccagcttgactgcgagcgtgacggcgcgagcaggtgcgaaagcaggtcatagtgatccggtggttctgaatggaagggccatcgctcaacggataaaaggtactccggggataacaggctgataccgcccaagagttcatatcgacggcggtgtttggcacctcgatgtcggctcatcacatcctggggctgaagtaggtcccaagggtatggctgttcgccatttaaagtggtacgcgagctgggtttagaacgtcgtgagacagttcggtccctatctgccgtgggcgctggagaactgaggggggctgctcctagtacgagaggaccggagtggacgcatcactggtgttcgggttgtcatgccaatggcactgcccggtagctaaatgcggaagagataagtgctgaaagcatctaagcacgaaacttgccccgagatgagttctcnnnnncctttaagggtcctgaaggaacgttgaagacgacgacgttgataggccgggtgtgtaagcgcagcgatgcgttgagctaaccggtactaatgaaccgtgaggcttaaccttacaacgccgaaggtgttttggcggatgagagaagattttcggcctgatacagattaaatcagaacgcagaagcggtctgataaaacagaatttgcctggcggccgtagcgcggtggtcccacctgaccccatgccgaactcagaagtgaaacgccgtagcgccgatggtagtgtggggtctccccatgcgagagtagggaactgccaggcatcaaattaagcagtaagccggtcataaaaccggtggttgtaaaagaattcggtggagcggtagttcagtcggttagaatacctgcctgtcacgcagggggtcgcgggttcgagtcccgtccgttccgccaccctaattaggggcgtagttcaattggtagagcaccggtctccaaaaccgggtgttgggagttcgagtctctccgcccctgccagaaatcatccttagcgaaagctaaggattttttttatctgaaataaccctctctgaagtaaatccttctaccggcatccttgccagccattcagattaatacacttcatccagcacgttaattttcaatagatcgcgaatcaacgtatttttatcgctattttgcagccatatggcataaagcggccgtgaaagtgttgtgctatcgacaacggtatgcaggccgccttttttacgcgcccagctgacgggtagccaggtgcaaccattaagcatcgcaatctgttgctgtgccagttcagcagaactggttgtcagaatgggcacttcgtcagcaccgatcaaacctgcctcatgctgttgaaaatctggcccccactccagtcgcagatagttaagatctccctttagtttagaaggggcactggtataaagcgctaaagtgaaataccccagcaactgactactaaattcgtccattttgggcgcttcagtggtaataagaagatcaagctggcgttcatgcagctgttttaccagagactgccgttgggcaattcgcgcttcgaactgtaagcctgtatgggcatcctgattttgatacaaacgtcccagccactgattaagcatacattcccacaatgaggcgctggcaccgatagaaaactcgttatgtcgtgaggtatgcgccacctccttacgggcggcctgccaggtgctcatgagcgtttctgcataaggcagtagtttttcaccggcagcggttaaacggatattgtttctgtggcgggtgaaaaggttcacacccagttgattttccagttgtctgattcgaaagctcactgctgactgggtcagatagagcgattcagccgctcgaccaaagtgacgcgttcggctaacttccaggaaagtttttaacaattccgtatccacagtgctctccgcaaaattatttgtcgttatgatttaaatgttttgttttacactctgtcaagcgtaactaatactccgcgccataactagctcggtcaaagaattaggagcgtgcaggatggcggaaagctttacgacgactaatcgatatttcgacaataaacattatccacgtggattctctcgccatggtgatttcaccatcaaagaggcacaactgcttgagcgtcatggttatgccttcaatgagttggatcttggcaaacgcgagccggttaccgaggaagagaaactcttcgtagcagtatgccgtggcgaacgtgagccagtgacagaagcagaacgcgtgtggtccaagtatatgacgcgtatcaagcgtccaaaacgttttcacaccctttccggcggtaaaccgcaggttgaaggtgctgaagactacaccgattctgacgattaataaaaagggcgaaatgccctttttttatgtcagtagtttttgcagatggatgagcaaacggtcaatcgcacgatagctaactgcctcctgcaaatgctgacgtgtgataatgtcagactgatcaatatcagcaatggttcgtgcaactttcaataaccgctgccaggcacgaatcgataaccccagatggatcagcgtttcttccagccactgcgcatcttcgctctcaagcttgcagaatttgcgtatttccggactatccagccaggcgttcaacttattctgccgcttaaattggcgctctctggcagccattacacgttgtttaacggtggtgctgctttctcccggcactaccgttttactcaaaatgccggggggtggtaatgggatctccagtgagagatcgaagcggtcgagaaagggccccgagagccggttgagataacgtaatgtctgttctggcgtgcagcggttatggtttccctgataatgtccggtagggctgggattcatcgccgcaacaagctggaaacgggctggataggttatttttgctcgtgtgcgtgaaagatggatctgcccggattcaatcggctctcgcaaagcatccagtgtacgccgttcaaattcaggtagctcatcaagaaaaagcacgccgttatgcgccaacgaaatttcacctggccctggaattgcaccaccgcccaccatcgcagttaacgacgcactgtgatgaggtgagcggaacgggcgctgccgccattgtttttgtactgattcagcatttaccagacttaatatcgcagcgctctccagtgcctcttcattgcttaaatctggcaaaagaccattaatacggctggcgagcattgttttacctgttcccggcggcccaatcagtaaaaggttgtgcccgccagcggcggtaatttccagtcctcgctttccttgctcctgaccgacaacatcactgagatcatgttgtagcgcccgggatactgcatcagttggtttcgggcgttcgagagcgtgcttaccttccagaaacgcacagacagcttgcagatgatcggctaccaggcatccttcaccgttaattagccccacttcatcttcgttatctttcgcgacgataatttttctgcccgacttaatagcttcagttgcactggagattgcaccgggaacgccacgcagagcgcctgtaagcgccagttctccgactaattcatattcatctaacttattggctgtaagctgttctgaggccgccagcaacgcaatggcgataggtaaatcatatcgtcccccttcttttggtagatcggctggagcaaggttaatggtgatttttttcgccggatattcatatccgctattgataatggcgctgcgcacgcgatcgcgagcttcttttaccgttgtttctggtaagcccaccatcgttaagccgggcaaacctttactgatatgtacctcaacagtgattgggggcgcatttactcccagggctgcgcgggtatgaacaattgacagtgacataagccctccttgagtcaccattatgtgcataagatatcgctgctgtagcccgctaattcgtgaattttagtggctgattcctgtttatttgtgcaagtgaagttgagttgttctggcggtggaatgatgctcgcaaaaatgcagcggacaaaggatgaactacgagggagggaacaacattcgtactgaaattgaatttttttcactcactattttctttttaannnncannnnnttctattgaaattattaaagccatcataaaaaacggccaaaaaatatcttgtgctattcgcaaaatctatggtaactctttaggcattccttcgaacaagatgcaagaaaagacaaaatgacagcccttctacgagtgattagcctggtcgtgattagcgtggtggtgattattatcccaccgtgcggggctgcacttggacgaggaaaggcttagagatcaagccttaacgaactaagacccccgcaccgaaaggtccgggggttttttttgaccttaaaaacataaccgaggagcagacaatgaataacagcacaaaattctgtttcccaagattcaggacggggaactaactatgaatggcgcacagtgggtggtacatgcgttgcgggcacagggtgtgaacaccgttttcggttatccgggtggcgcaattatgccggtttacgatgcattgtatgacggcggcgtggagcacttgctgtgccgacatgagcagggtgcggcaatggcggctatcggttatgcccgtgctaccggcaaaactggcgtatgtatcgccacgtctggtccgggcgcaaccaacctgataaccgggcttgcggacgcactgttagattctatccctgttgttgccatcaccggtcaagtgtccgcaccgtttatcggtactgacgcatttcaggaagtggatgtcctgggattgtcgttagcctgtaccaagcacagctttctggtgcagtcgctggaagagttgccgcgcattatggctgaagcattcgacgttgccagctcaggtcgtcctggtccggttctggtcgatatcccaaaagatatccagttagccagcggcgacctggaaccgtggttcaccaccgttgaaaacgaagtgactttcccacatgccgaagttgagcaagcgcgccagatgctggcaaaagcgcaaaaaccgatgctgtacgttggtggtggcgtgggtatggcgcaggcagttcctgctttacgagaatttctcgctaccacaaaaatgcctgccacctgcacgctgaaagggctgggcgcagttgaagcagattatccgtactatctgggcatgctgggaatgcatggcaccaaagcggcgaacttcgcggtgcaggagtgcgacttgctgatcgccgtgggtgcacgttttgatgaccgggtgaccggcaaattgaacaccttcgcaccacacgccagtgttatccatatggatatcgacccggcagaaatgaacaagctgcgtcaggcacatgtggcattacagggtgatttaaatgcgctgttaccagcattacagcagccattaaatatcaatgactggcagcaatactgcgcgcagctgcgtgatgaacatgcctggcgttacgaccatcccggtgacgctatctacgcgccgttgttgttaaaacaactgtcggatcgtaaacctgcggattgcgttgtgaccacagatgtggggcagcatcagatgtgggccgcgcagcacatcgcacacactcgcccggaaaatttcattacctccagcggcttaggcaccatgggttttggtttaccggcggcggttggcgcgcaagtcgcgcgaccaaacgataccgtcgtctgtatctccggtgacggctctttcatgatgaatgtacaagagctgggcaccgtaaaacgcaagcagttaccgttgaaaatcgtcttactcgataaccaacggttagggatggttcgacaatggcagcaactgtttttccaggaacgatacagcgaaaccacccttaccgataaccccgatttcctcaagttagccagcgccttcggcatccctggccaacacatcacccgtaaagaccaggttgaagcggcactcgacaccatgctgaacagtgatgggccatacctgcttcatgtctcaatcgacgaacttgagaacgtctggccgctggtgccgcctggtgccagtaattcagaaatgttggagaaattatcatgatgcaacatcaggtcaatgtatcggctcgcttcaatccggaaaccttagaacgtgttttacgcgtggtgcgtcatcgtggtttccacgtctgctcaatgaatatggccgccgccagcgatgcacaaaatataaatatcgaattgaccgttgccagcccacggtcggtcgacttactgtttagtcagttaaataaactggtggacgtcgcacacgttgccatctgccagagcacaaccacatcacaacaaatccgcgcctgagcgcaaaaggaatataaaaatgaccacgaagaaagctgattacatttggttcaatggggagatggttcgctgggaagacgcgaaggtgcatgtgatgtcgcacgcgctgcactatggcacctcggtttttgaaggcatccgttgctacgactcgcacaaaggaccggttgtattccgccatcgtgagcatatgcagcgtctgcatgactccgccaaaatctatcgcttcccggtttcgcagagcattgatgagctgatggaagcttgccgtgacgtgatccgcaaaaacaatctcaccagcgcctatatccgtccgctgatcttcgttggtgatgttggcatgggcgtaaacccgccagcgggatactcaaccgatgtgattatcgccgctttcccgtggggagcgtatctgggcgcagaagcgctggagcaggggatcgatgcgatggtttcctcctggaaccgcgcagcaccaaacaccatcccaactgcggcaaaagccggtggtaactatctctcttccctgctggtgggtagcgaagcgcgccgccacggttatcaggaaggtatcgcgctggatgtgaacggttatatctctgaaggcgcaggcgaaaacctgtttgaagtgaaagatggtgtgctgttcaccccaccgttcacctcctccgcgctgccgggtattacccgtgatgccatcatcaaactggcgaaagagctgggaattgaagtgcgtgagcaggtgctgtcgcgcgaatccttgtacctggcggatgaagtctttatgtccggtacggcggcagaaatcacgccagtgcgcagtgtagacggtattcaggttggcgaaggccgttgtggcccggtcaccaaacgcattcagcaagccttcttcggcctctttaccggcgaaaccgaagataaatggggctggttagatcaagttaatcaataaatacaaaaaatnnnnnnnnnnnnnnccgtcccatttacgagacagacactgggagtaaataaagtatgcctaagtaccgttccgccaccaccactcatggtcgtaatatggcgggtgctcgtgcgctgtggcgcgccaccggaatgaccgacgccgatttcggtaagccgattatcgcggnnnngaactcgttcacccaatttgtaccgggtcacgtccatctgcgcgatctcggtaaactggtcgccgaacaaattgaagcggctggcggcgttgccaaagagttcaacaccattgcggtggatgatgggattgccatgggccacggggggatgctttattcactgccatctcgcgaactgatcgctgattccgttgagtatatggtcaacgcccactgcgccgacgccatggtctgcatctctaactgtgacaaaatcaccccggggatgctgatggcttccctgcgtctgaatattccggtgatctttgtttccggcggcccgatggaggccgggaaaaccaaactgtccgatcagatcatcaagctcgatctggttgatgcgatgatccagggcgcagacccgaaagtatctgactcccagagcgatcaggttgaacgttccgcatgcccaacctgcggttcctgctccgggatgtttaccgctaactcaatgaactgcctgaccgaagcgctgggtctgtcgcagccgggcaacggctcgctgctggcaacccactctgaccgtaagcagctgttcctcaatgctggtaaacgcattgttgaattgaccaaacgttactacgagcaaaacgacgaaagtgcactgccccgcaatannnntagcaaagcggcgtttgaaaatgccatgacgctggatatcgcgatgggtggatcgactaacaccgtacttcacctgctggcggcggcgcaggaagcggaaatcgacttcaccatgagtgatatcgataagctttcccgcaaggttccgcagttatgcaaagtcgcgccgagcacccaaaaataccatatggaagatgttcaccgtgctggtggtgttatcggtattctcggcgagctggatcgtgcggggttactgaaccgtgatgtgaaaaacgtacttggcctgacgttgccgcaaacgctggaacaatacgacgttatgctgacccaggatgacgcggtaaaaaatatgttccgcgccggccctgcgggtatccgtaccacccaggcattctcgcaagattgccgttgggatacgctggacgacgatcgcgccaatggctgtatccgctcgctggaacacgcctatagcaaagacggcggcctggcggtgctctacggtaatttcgcggaaaacggctgcatcgttaanactgcgggcgtcgatgacagcatcctcaaattcaccggcccggcgaaagtgtacgaaagccaggacgacgcggtagaagcgattctcggcggtaaagttgtcgccggagatgtggtagtaattcgctatgaaggcccaaaaggtggtccggggatgcaggaaatgctctacccaaccagcttcctgaaatcaatggggctcggtaaagcctgtgcgctgatcaccgacggtcgtttctctggcggcacctctggcctttctatcggccacgtctcaccggaagcggcaagcggcggcagcattggcctgattgaagacggcgacctgatcgccatcgacattccgaaccgtggcattcagttacaggtaagcgatgccgaactggcggcgcgtcgtgaagcgcaggaagctcggggtgacaaagcctggacgccgaaaaatcgtgaacgtcagatctcctttgccctgcgtgcttatgccagcctggcaaccagcgccgacaaaggcgcggtgcgcgataaatcgaaactggggggttaataatggctgactcgcaacccctgtccggtgccccggaaggtgctgaatatttaagagcggtgctgcgcgcgccggtctacgaagcggcgcaggtcacgccgctacaaaaaatgaaaagctctcgtctcgtcttgataacgtgattctggtgaagcgcgaagatcgccagccagtgcacagctttaagctgcgcggcgcatacgccatgatggcgggcctgacggaagaacaaaaagcgcacggcgtgatcactgcttctgcgggtaaccacgcgcagggcgtcgcgttttcttctgcgcggttaggcgtgaaggccctgatcgttatgccaaccgccaccgccgacatcaaagtcgacgcggtgcgcggcttcggcggcgaagtgctgctccacggcgcgaactttgatgaagcgaaagccaaagcgatcgaactgtcacagcagcaggggttcacctgggtgccgccgttcgaccatccgatggtgattgccgggcaaggcacgctggcgctggaactgctccagcaggacgcccatctcgaccgcgtatttgtgccagtcggcggcggcggtctggctgctggcgtggcggtgctgatcaaacaactgatgccgcaaatcaaagtaatcgccgtagaagcggaagactccgcctgcctgaaagcagcgctggatgcgggtcatccggttgatctgccgcgcgtggggctgtttgctgaaggcgttgcggtaaaacgtatcggcgacgaaaccttccgtttgtgccaggagtatctcgacgatatcatcaccgtcgatagtgatgcgatctgtgcggcgatgaaggatttattcgaagatgtgcgcgcggtggcggaaccctctggcgcgctggcgctggcgggaatgaaaaaatatatcgcccagcacaacattcgnnnnnnnnntgccgtggcncatattctttccggtgccaacgtgaacttccacggcctgcgctacgtctcggaacgctgcgaactgggcgaacagcgtgaagcgttgttggcggtgaccattccggaagaaaaaggcagcttcctcaaattctgccaactgcttggcgggcgatcggtcaccgagttcaactaccgttttgccgatgccaaaaacgcctgcatctttgtcggcgtgcgcctgagccgcggcctcgaagagcgcaaagaaattttgcagatgctcaacgacggcggctacagcgtggtggatctctccgacgacgaaatggcgaagttgcatgtgcgctatatggtcggcgggcgtccgtcacatccgttgcaggaacgcctctacagcttcgaattcccggaatcaccgggcgcgctgctgcgcttcctcaacacgctgggtacgcactggaacatttctttgttccactatcgcagccatggcaccgactacgggcgcgtactggcggcgttcgaacttggcgaccatgaaccggatttcgaaacccggctgaatgagctgggctacgattgccacgacgaaaccaataacccggcgttcaggttctttttggcgggttagggaaaaatgcctgatagcgcttcgcttatcaggcctactcgcgcgacaacgtcatttgtggttcggcaaaatcctccagaacgcctcaatcagcggctcatgcagccgctttttttgtgcacacacgcccagttcaaacggcgttttctcatcgctgcgatctaaaatcattacccggttgcgtacaggctccgggctgttttccagcaccacttccggcaacagcgccacaccacagccgagcgccaccatcgataccatcgcttcatgcccgccaaccgtggcgtaaatcattgggttgctgattttattgcgtcgaaaccacagttcaatgcggcggcgtactggcccctgatcggccatgataaacggtaccgttgaccagtccggcttctctaccgagacctgattacgcaccgggcagggcagcgcgggcgcaatcagcactaccgccagattctccagcatcgaaaacgctacagcgccgggtagcgtctccggtttcccggcaatcgccagatccgcttctcccgtgaccactttttccattgcatctgccgcatcaccagtagtgagtttaatctccaccgacgggtgttccgcgcggaagcgatccagaatcggcggcagatggctgtaggcagcggtcaccgagcagaagatatgtaattcgccagagagcgacggcccttgctgatcgatggtgtggcgcagctgctgatactgcaatagcgtttgctgggcgaaaacgcgcagttcttcgcccgcttcagtcagcgtcaccgtgcggttatcgcgcacaaacagcggctgaccgagatcttcttccaggcgctgaatctgccgtgagagcgtggatgggctaacgtgcatcgcccgcgcgctgcggccaaaatggcggctttccgccagatgcaggaaggttttcagatcgcgtaaatccacagggacagccctcgatgttgacgttgcaaaaattgcaatatgatgttgtgaatatatcaatttccgcaataaatttcctgtcatatagtgaattcaatctcgcaaacgcgaaccgaacaataagaagcacaacatcacgaggaatcaccatggctaactacttcaatacactgaacctgcgccagcaactggcacagttgggcaaatgtcgctttatgggccgcgacgaattcgccgatggcgcgagctaccttcagggtaaaaaagtggtcatcgtcggctgtggcgcacagggtctgaaccagggcctgaacatgcgtgattctggtctcgatatctcctacgctctgcgtaaagaagcgattgccgagaagcgcgcgtcctggcgtaaagcgaccgaaaatggttttaaagtgggtacttacgaagaactgatcccacaggcggatctggtggttaacctgacgccggacaagcagcactctgatgtagtgcacaccgtacagccactgatgaaagacggcgcggcgctgggttactcgcatggtttcaacatcgtcgaagtgggcgagcagatccgtaaagacatcaccgtagtaatggttgcgccgaaatgcccaggcaccgaagtacgtgaagagtacaaacgtggattcggcgtaccgacgctgattgccgttcacccggaaaacgatccgaaaggcgaaggcatggcgatcgctaaagcatgggcggcggcaaccggtggtcatcgtgcgggcgtgctggaatcctctttcgttgcggaagtgaaatctgacctgatgggcgagcaaaccattctgtgcggtatgttgcaggccggctctctgctgtgcttcgacaagctggtggaagaaggcaccgatccggcatacgcagaaaaactgattcagttcggctgggaaaccatcaccgaagcgctgaaacagggcggcatcaccctgatgatggaccgtctctctaacccggcgaaactgcgcgcttacgcgttgtcagaacagctgaaagagatcatggcaccgctgttccagaaacatatggacgacatcatctccggcgaattctcctccggcatgatggcggactgggccaacgatgataagaaactgctgacctggcgtgaagagaccggcaaaaccgcgtttgaaaccgcgccgcagtatgaaggcaaaatcggcgagcaggagtacttcgataaaggcgtactgatgatcgcgatggtgaaagcgggcgttgagctggcgtttgaaaccatggttgattccggcatcatcgaagaatctgcttactatgaatcactgcacgaactgccgctgattgccaacaccatcgcccgtaagcgtctgtacgaaatgaacgtggttatctctgataccgctgagtacggtaactatctgttctcttacgcttgtgtgccgttgctgaaaccgtttatggcagagctgcaaccgggcgatttgggtaaagctattccggaaggtgcggtagataacgcgcaactgcgtgatttgaacgaagcgattcgcagccatgcgattgagcaggtaggtaagaaactgcgcggntacatgactgatatgaaacgtattgctgttgcgggttaatagcgattcagagttcaaggccttctcccggagaaggccttgctattagttacggtacagcaccttaatgatgtggtaaccgaactgggtgtgcagcgggccggttggctccagtaccggacaagagaacacaactttatcgaacgccggaaccatctgaccctggcggaattcacctaaatcaccgccgcgtttgcctgatgggcaaatggagtgtttcttcgccagcttgccaaaatcggccccgttcttaatctgctcgagaagatccagagccagtttctcttcttttacaaggatatgcagtgctgctgctgtttttgccatgatcgtgccttgagtgaataattgtcaggcggcgattttagcatgatccgcagatgctaacgtaattgtcagtcagggaggggctggtacatatatggcaaaagcccggaaaatccgggcttcgcaggtccctcaaggggagaaaacttagggcctctatgggctacaaagtcattatcggggatggtgattttattgtcaatttatgagcgatatggcattgattgacttgatgaccgccctctgtatgtctgcaaccaactcatgtggcaaacattgattaagataccctctgtaagttcttgctctgtttaatctgtttcgactgacttgttgtaccaggtcggttttggcccaacgaatctgctgatcaaagaattgcaggtcattgataacattactggctatttcaacatgcattccacgttttaacttgtcatggtcgcgagtggttgataatggaacgacgatgaatgcgttgccattaatttttccgttgagcacgacaactaacctgttttttatcatttcaggaggaatgcggccatcgtaatacgtcgtgctgaacggtccattttggctaacaggatagttaccaaagttgcattccagtatttcaccaaccttagggctgaaattaatcgccacgagtaaacctctccttagtaaactctgaaaaagtaataacacaacgttacgacccgatattttctaagtctaatggnnnnacgatgaactccgatttcggtcttctctctctgatttaaacatccgcagccaaccggttagcggcttacacgcggtcacattcaaatgcgattctgctacaatcctccccccgttcgaagattgagcaatacacctatgcgtctaaaccccggccaacaacaagctgtcgaattcgttaccggcccctgcctagtgctggcgggcgcgggttccggtaaaactcgtgttatcaccaataaaatcgcccatctgatccgcggttgcggttatcaggcgcggcacattgcggcggtgacctttactaataaagcagcgcgcgagatgaaagagcgtgtanggcagacgctggggcgtaaagaggcgcgtgggctgatgatctccactttccatacgttggggctggatatcatcaaacgcgagtatgcggcgcttgggatgaaagcgaacttctcgttatttgacgataccgatcagcttgctttgcttaaagagttgaccgaggggctgattgaagatgacaaagttctcctgcaacaactgatttcgaccatctctaactggaagaacgatctcaaaactccggcgcaggcggcggcagaggcaaagggcgagcgggatcgtatttttgcccattgttatgggctgtatgatgcacacctgaaagcctgtaacgttctcgacttcgatgacctgattttattgccgacgttgctgctgcaacgcaatgaagaagtacgcgaacgctggcagaacaaaattcgctacctgctggtggatgagtatcaggacaccaacaccagccagtatgaactggtgaaactgctggtgggcagccgcgcgcgctttaccgtggtgggtgacgatgaccagtcgatctactcctggcgcggtgcacgtccgcaaaacctggtgctgctgagtcaggattttccggcgctgaaggtgattaagcttgagcagaactatcgctcttccgggcgtattctgaaagcggcgaacatcctgatcgccaataacccgcacgtctttgaaaagcgtctgttctccgaactgggttacggcacagagctaaaagttttaagcgcgaataacgaggaacatgaagccgagcgcgttactggcgagctgatcgcccatcacttcgtcaataaaacgcagtacaaagattacgccattctttatcgcggcaaccatcagtcgcgggtatttgaaaaattcctgatgcaaaaccgcatcccgtacaaaatatccggtggtacgtcgtttttctctcgtcctgaaatcaaggacttgctggcttatctgcgcgtgctgactaacccggacgatgacagcgcatttctgcgtatcgttaacacgccgaagcgagagattggcccggctacgctgaaaaagctgggtgagtgggcgatgacgcgcaataaaagcatgtttaccgccagctttgatatgggcctgagtcagacgcttagcggacgtggttatgaagcattgacccgcttcactcactggttggcagaaatccagcgcctggcggagcgggagccgattgctgcggtgcgtgatctgatccatggcatggattatgaatcctggctgtacgaaacatcgcccagcccgaaagccgccgaaatgcgcatgaagaacgtcaaccaactgtttagctggatgacggagatgctggaaggcagcgaactggatgagccgatgacgctcacccaggtggtgacgcgctttactttgcgcgacatgatggagcgtggtgagagtgaagaagagctggatcaggtgcaactgatgactctccacgcgtcaaaaggactggagtttccttatgtctacatggtcggtatggaagaagggtttttgccgcaccagagcagtatcgatgaagataatatcgatgaggagcggcggctggcctatgtcggcattacccgcgcccagaaggaattgacctttacgctgtgtaaagaacgccgtcagtacggcgaactggtgcgcccggagccgagccgctttttgctggagctgccgcaggatgatctgatttgggaacaggagcgcaaagtggtcagcgccgaagaacggatgcagaaagggcaaagccatctggcgaatctgaaagcgatgatggcggcaaaacgagggaaataatcaaggccggaaaagatgcgtcagcatcgcatccggcacttactcattaatgcacttccagcggccagtggacatagctctgccactggctttcctgagcaataatctctttacccagcggatgttgggttagccaaccttgcggaagcgtcaaggtcaacagttcatggttagcctgtaatgtcatctctggcacgagatcgtcacggcgacggctggcaaaaatgatggccaggcgtagtaaacggcagagttgttctgcgacgcgcggcggtacggcattttgctgatgcagcgatgagagatcgaccggattagtctggttgagcagtagcgtcgccagcaattttttctgtgcgggggtaaaaccgggaagatccagattacgcaccagataagcagcgtgttgcggcgcttgtttgaagtcaacgctcaggccgatttcatgaagctgacaggcgctgatgagcaaatcgcggcttattgcttcaagatgccattcgttttccacctgatcgaagaagttagccgcaactttggctacgcgctgtgcctgatcaatatcgatcataaagcggcgttgaatattacgcagcgtacggctgcgaatatcctgctcgacggccagatgcaacatgccgtagaccaggccttcacgcagcgcaccgcccgccagggtcatacactgaatattcagttcggtaaaaatggcgatcaggatcgccagaccactcgggaacactaacgcacgttccagcgtcagcccgtcaatctccagttcctccagccgaccgcaatgaatggctcgctgtttcaattgctgcaacttttccagggtaatgcgttcatccatcccctgtgccatcatgatttcctgtaacgcctgcacggtgccggaagcaccaacgcacactttccagccgtgataccgtaattcatcggcaaccggacgtaacacttcgcgtgccgctttttctgcagcatcaaaattttcctgccccagattacgatcggcaaaatagcgttccagccaggtgacgcagcccatcgacaggctgaacaacgaggtggtttgtgcacccgtgccggttaccagttcagtactggcaccgccgatatccactaccaggcgctgatcggcaccgccagtggtgtgagcaacaccctgataaatcagacgtgcttcctcttcaccgctgatcacctgtaccggacaaccgaggatttcctgcgctttggcaataaaatcacccgcattgacggcaaggcgtaacgtcgccgtagcgacaacgcgaatttgcgagggaggaatatcttgcagacgttcagcaaacaggcgcaaacattgccaactgcgctccattgcttcattggagagggcattttcgctattcaggccagcagccagacgcactttgcgttttattcgcgtcagcgtctggatgcttccagccacctcgcgcacaaccagcatatgaaaactattcgaaccgagatcaatggctgcatacagcgacgaggtggaacccatactcttcatccttcaatctgtctctgtgttggctgcattctttcacctgaatcacttactacagtaagctcatcgggattcattctcttgccatcttgatacagtttgaatgattttgagtatgacattttttatttaacctgaacgacgacgattacgcggagcgccagtacgacgcggaccattgcctgtgcgcgggcgcgtgaggcgcagcggttttggcagatcggtcatcaatgcgtccggattgtatttgcttaccggaattgagtgaccaatataggtctcaatagcaggcaaattcaatgcatactcttcacacgccaggctaatagagtgaccgcttgcgcctgcgcgacctgtacgaccaatacggtgaacgtaatcttcacagtcatcgggtaaatcgtagttaaagacgtgcgtcactgccggaatatgcaaaccacgcgcggcaacgtcggtggcaaccagaatatccagatcgccacgggtaaattcatcaagaatacgcagacgttttttctgcgcgacatcgcctgtcaacaaaccgacacgatgaccatctgccgccaggtggccccagatctcttcacaacggtgtttggtattggcgaaaataatcgctctgtctggccactcttcttcgatcagcgtttgcagcaaacgcattttttcttcgttagaagggtagaaaagctcttctttaatacggtggcccgttttctgttccggttccacttcaatatattcggcattgttcatctgctcgaacgccagttcacgtacccggtacgaaagcgtggcggagaacagcatgttgaggcgctggtttgcaggcggcatacggcggaacagccagcggatatctttaataaagcccagatcgtacatgcgatcggcttcgtccagtaccactacctgaatggcaccgaggttaatgtggttctgcttggcgtagtcaattaaacgccccgtggtgccaatcagaatgtcaacgccgctttccagcactttcagctgtttgtcgtaaccatcaccaccgtaagccagacccagcttcaggccggtagcttccgccagcggttccgcatcggcatggatctgcacggcaagttcacgcgtcggtgccataattaaggcacgcggctgattcaccttgcgatcggcaatcgcgggatgagagagaagacaatgaaacgttgacgtaagaaacgccatcgttttcccggtaccggtttgcgcctgcccggctacgtcacgacccgccagcgtcagcggaagggccagtgcctgaatgggcgtacagttatgaaacccttttttttcaagggcttctacaaccttcggatgcagggcgaagtcggaaaacttctgttctgttaaatgtgttttgctcatagtgtggtagaatatcagcttactattgctttacgaaagcgtatccggtgaaataaagtcaacctttagttggttaatgttacaccaacaacgaaaccaacacgccaggcttattcctgtggagttatatatgagcgataaaattattcacctgactgacgacagttttgacacggatgtactcaaagcggacggggcgatcctcgtcgatttctgggcagagtggtgcggtccgtgcaaaatgatcgccccgattctggatgaaatcgctgacgaatatcagggcaaactgaccgttgcaaaactgaacatcgatcaaaaccctggcactgcgccgaaatatggcatccgtggtatcccgactctgctgctgttcaaaaacggtgaagtggcggcaaccaaagtgggcgcactgtctaaaggtcagttgaaagagttcctcgacgctaacctggcgtaagggaatttcatgttcgggtgccccgtcgctaaaaactggacgcccggcgtgagtcatgctaacttagtgttgacttcgtattaaacataccttattaagtttgaatcttgtaatttccaacgcttcccgttttatcttaaatgcgaagtgaacagatttctggctcgtcactcaatccgtcttgtcgtttcagttctgcgtactctcctgtgaccaggcagcgaaaagacatgagtcgatgaccgtaaacaggcatggatgatcctgccataccattcacaacattaagttcgagatttaccccaagtttaagaactcacaccactatgaatcttaccgaattaaagaatacgccggtttctgagctgatcactctcggcgaaaatatggggctggaaaacctggctcgtatgcgtaagcaggacattatttttgccatcctgaagcagcacgcaaagagtggcgaagatatctttggtgatggcgtactggagatattgcaggatggatttggtttcctccgttccgcagacagctcctacctcgccggtcctgatgacatctacgtttcccctagccaaatccgccgtttcaacctccgcactggtgataccatctctggtaagattcgcccgccgaaagaaggtgaacgctattttgcgctgctgaaagttaacgaagttaacttcgacaaacctgaaaacgcccgcaacaaaatcctctttgagaacttaaccccgctgcacgcaaactctcgtctgcgtatggaacgtggtaacggttctactgaagatttaaccgctcgcgtactggatctggcatcacctatcggtcgtggtcagcgtggtctgattgtggcaccgccgaaagccggtaaaaccatgctgctgcagaacattgctcagagcattgcttacaaccacccggattgtgtgctgatggttctgctgatcgacgaacgtccggaagaagtaaccgagatgcagcgactggtaaaaggtgaagttgttgcttctacctttgacgaacccgcatctcgccacgttcaggttgcggaaatggtgatcgagaaggcgaaacgcctggttgagcacaagaaagacgttatcattctgctcgactccatcactcgtctggcgcgcgcttacaacaccgttgttccggcgtcaggtaaagtgttgaccggtggtgtggatgccaacgccctgcatcgtccgaaacgcttcttcggtgcggcgcgtaacgtggaagagggcggcagcctgaccattatcgcgacggcgcttatcgataccggttctaaaatggacgaagttatttacgaagagtttaaaggtacaggcaacatggaactgcacctctctcgtaagatcgctgaanaacgcgtcttcccggctatcgactacaaccgttccggtacccgtaaagaagagctgctcacgantcaggaagaactgcagaaaatgtggatcctgcgcaaaatcattcacccgatgggcgaaatcgatgcaatggaattcctcattaataaactggcaatgaccaagaccaatgacgatttcttcgaaatgatgaaacgctcataaatttgtcttatgccaaaaacgccacgtgtttacgtggcgttttgcttttatatctgtaatcttaatgccgcgctggcgatgttaggaaaattcctggaatttgctggcatgttatgcaatttgcatatcaaatggttaatttttgcacaggactggtgggttcggaacggactttcccttctgaataaaggtcttcgtggttatacttctgctaataattttctctgagagcatgcattgtgaatttactgacagtgagtactgatctcatcagtatttttttattcacgacactgtttctgttttttgcccgtaaggtggcaaaaaaagtcggtttagtggataaaccaaacttccgcaaacgtcaccaggggttgataccactcgttgggggtatttcggtttacgcagggatttgcttcacgttcggaattgtcgattactatattccgcatgcatctctctatctcgcttgtgccggtgtgcttgttttcattggcgcgctggatgaccgttttgatatcagcgtaaaaatccgtgccaccatacaggccgctgttggcattgttatgatggtgtttggcaacctttatctcagtagcctgggttatatctttggctcctgggagatggtgctcggaccgtttggttacttcctgacgctatttgccgtctgggcggccattaatgcgttcaacatggttgatggcattgatggcttgctgggcgggttgtcctgcgtctcgtttgcagcaatcggtatgattttgtggttcgacgggcaaaccagcctcgcaatctggtgctttgcgatgatcgccgccatcctgccatatatcatgcttaaccttggtatcctgggtcgccgctacaaagtctttatgggtgatgcgggcagtacgctgattggttttaccgtgatctggatcctgctcgaaacgacccaaggcaaaacccatcccatcagcccggttaccgctttgtggataatcgccattccgctaatggatatggtggcgattatgtaccgtcgcctgcgtaaaggcatgagcccattctctcctgaccgtcagcatattcaccatttgatcatgcgtgccgggtttacttcccgccaggcgtttgtgctgattacccttgccgcagcactgctcgcttccattggcgtgctggcagaatattctcattttgtcccggagtgggtcatgttggtgctctttttgctagcattcctcctctatggatattgcattaagcgtgcctggaaagttgctcgctttattaagcgcgtaaaacgcagactgcgtagaaatcgtggtggcagccccaatttaaccaaataaatgaggatgtgatgacacaaccaatgcctgggaaaccggccgaagacgctgaaaatgaactggatattcgtgggttgtttcgtaccttgtgggctgggaagctatggattattggcatggggctggcgtttgcgttaatcgcgctggcgtatacgttttttgctcgtcaggagtggagctcgacggcgattaccgatcgtccaacggtgaatatgctggggggatattactcgcagcagcaatttttgcgtaacctggatgtccgttcaaacatggcttctgccgaccaaccatcggtcatggacgaagcctataaagagtttgttatgcaactggcctcgtgggatacccgcagagagttctggctgcaaaccgactattacaagcagcggatggtgggcaacagcaaagccgatgcggcgttgctggatgaaatgattaacaacatccagtttatccccggagactttacccgcgcggtcaatgacagcgtgaagcttattgccgaaaccgcgcctgacgctaataacctgttacgtcagtatgttgcttttgccagccagcgtgcagccagccatctgaatgatgagctgaaaggcgcatgggcggcgcgtaccatccagatgaaagcacaggtgaagcgtcaggaagaggtggcgaaagccatctacgaccgccggatgaacagcattgagcaggcgctgaaaattgctgagcagcataatatttcgcgcagtgcgacagatgtgcctgccgaggaattacctgattcagaaatgttcctgcttgggcgtccaatgctccaggctcgactggaaaatttacaggccgtcggtccggcctttgatctcgactatgatcagaatcgggccatgttaaacaccctgaatgttggtccaaccctggatccgcgttttcagacctatcgctatttgcgtacgccggaagaaccggtaaaacgcgatagcccacgtcgtgccttcctgatgattatgtggggcattgtcggggggctgatcggggctggtgtcgcattaacccgccgttgctcgaaatagcaacactgctgcggtgagcgcaaaggcgctcgccgcttattcgaagagaatcgatgtgaaagtactgactgtatttggtacgcgcccggaagccatcaagatggctccgttggtgcatgcgttggcaaaagatcctttttttgaggctaaagtttgcgtcactgcgcagcatcgggagatgctcgatcaggtgctgaaactcttttccattgtacctgactacgatctcaacataatgcagccaggacagggcctgacagagataacctgtcggattctggaagggctaaaacctattcttgccgagttcaaaccagacgtcgtgctggttcacggcgacacaacgacgacgctggcaaccagcctggcggcgttttatcagcgtattcctgttggtcacgttgaggctggtttacgcacgggcgatctctattcgccgtggccggaagaggctaaccgtacattgaccgggcatctggcgatgtatcatttctctccaaccgaaacttcccggcaaaacttgctgcgtgaaaacgttgcagatagccgaatcttcattaccggtaatacagtcattgatgcactgttatgggtgcgtgaccaggtgatgagcagcgacacgctgcgttcagaacttgcggcaaattacccgtttatcgaccccgataaaaagatgattctggtgaccggtcacaggcgtgaaagcttcggtcgtggctttgaagaaatctgccacgcgctggcagacatcgccaccacgcaccaggacatccagattgtctatccggtgcatctcaacccgaacgtcagagagccggtcaatcgcattctggggcatgtgaaaaatgtcattctgatcgatcctcaggagtatttaccgtttgtctggctgatgaaccacgcctggctgattttgaccgactcaggcggcattcaggaagaagcgccttcgctggggaaaccggtgctggtgatgcgcgataccactgagcgtccggaagcggtgacggcgggtacggtgcgtctggtaggcacggataagcagcgaattgtcgaggaagtgacgcgtcttttaaaagacgaaaacgaatatcaaactatgagccgcgcccataacccgtatggtgatggtcaggcatgctctcgcattctggaagcgttaaaaaataatcggatatcactatgagttttgcgaccatttctgttatcggactgggttacatcgggctgcctacagcagcagcgtttgcctcacggcaaaaacaggtgattggtgtcgatatcaaccaacacgcggttgataccatcaatcgtggcgaaatccatatcgtcgagcctgatttggcgagcgtagtaaaaactgccgtagaaggcggttttttacgagcgagcacgacgccagttgaagcggatgcctggctgattgctgtacccacgccgtttaaaggcgatcatgagccagatatgacctacgttgaatcggctgctcgctccattgcgccagtgctgaaaaaaggcgcgctggtgatccttgaatccacctcgccggtggggtcaaccgagaagatggcagaatggttagcagagatgcgtccggatctcactttcccacagcaggtgggtgagcaggcggacgtcaacattgcttactgcccggaacgcgtgttaccgggccaggttatggtcgagctgattaaaaacgatcgcgtgattggtggtatgacgccggtttgttcggcccgcgccagcgaactgtacaaaattttcctcgaaggtgagtgtgtcgtcactaactcgcggacggcggaaatgtgtaagctcaccgaaaacagcttccgcgatgtgaatatcgcttttgctaatgaattgtcgctgatttgtgccgatcaggggattaacgtctgggaactgattcgcctggcgaatcgtcaccctcgcgttaatattcttcagcctggccctggcgtgggcggtcactgcattgctgttgatccgtggtttatcgtggcacagaacccccagcaggcgcggcttatccgtaccgcgcgcgaagtgaacgatcacaaaccgttctgggttatcgatcaggtgaaagcggcggtggctgattgcctggcggctaccgataaacgcgccagtgaactgaaaatcgcctgctttggtctggcgtttaaaccgaatattgatgacctgcgcgaaagcccggcgatggaaatcgctgaactgatcgcccagtggcatagcggcgaaactctggttgttgagcctaacatccaccagttgccgaaaaaactgaccgggctttgtactctggcgcagcttgacgaggcgctggcaacggcagacgtgctggtgatgctggtcgatcatagtcagttcaaagttatcaatggcgacaatgtccatcagcagtatgtcgtcgatgctaaaggagtctggcgctgatgagaaagattctgataacaggcggtgccgggtttattggctcggcgctggtgcgttatatcatcaacgaaacgagcgacgcggtggtagtggtcgataagctgacctacgccggaaacctgatgtcgctggcaccggtcgcgcaaagcgagcgctttgcctttgagaaagttgatatctgcgatcgggcagaactggcgcgcgtattcactgagcatcagccagactgtgtcatgcatctggcagccgaaagccatgttgaccgttntattgacggcccggcagcgtttattgaaaccaacattgtcgggacttatacattgcttgaagcggcgcgggcttactggaatgtgctgacggaagataaaaaatcagcgttccgttttcatcatatctccactgacgaantatatggtgacctgcactcgacggatgatttcttcaccgaaaccacgccgtatgcgccgagcagcccttattccgcgtcaaaagccagcagcgaccatctggtgcgcgcctggctgcgaacctatggtctgccaacgcttatcaccaactgctcgaataactacggtccttaccactttccggaaaaactgatcccgctgatgatcctcaacgcgctggcgggtaaaccgctaccggtatatggcaacgggcagcaaatccgtgactggctgtatgttgaagatcacgcccgcgcgctgtattgcgtggcgaccaccgggaaagtcggtgaaacctataatattggtggtcacaacgagcgtaagaatctcgatgttgtggaaaccatttgcgagctgctggaagaactggctccgaacaagccgcaaggcgtggtgcattatcgtgacttgatcacctttgtcgctgaccgtccggggcatgatctgcgctatgccattgatgcttcgaaaattgcccgtgaacttggctggctgccgcaggaaacctttgaaagtggaatgcgtaaaacggtgcagtggtatctggctaatgaaagctggtggaagcaggtgcaggacggcagctatcagggcgagcgtttaggtctgaaaggctaattttcagcggaggcaaacatgaaaggtattatcctggcgggcggttccggtacccgattgcatccgattacgcgcggcgtatcgaagcaactgttgccgatttacgataagccaatgatttactatccgctgtcggtgctgatgctggccggtatccgcgaaattctcatcatcactacgccggaagataaaggttatttccagcgcctgctgggcgatggtagtgagttcggtatccagctggaatatgccgaacagcccagcccggacggtctggcgcaggcctttatcatcggtgaaaccttccttaatggtgaaccttcttgtctggtgctgggcgataacatcttcttcggtcagggcttcagtccgaagctgcgtcatgttgcggcgcgcacggaagtggcgacggtttttggctatcaggtgatggacccggaacgctttggcgtggtggagtttgacgataatttccgcgctatctcgctggaagaaaagccaaaacagccgaaatcaaactgggcggtgaccgggctttatttctacgacagtaaagtcgtggagtacgcaaagcaggtgaagccgtcggagcgtggtgaactggagattacctccatcaaccagatgtacctcgaggcgggcaacctgaccgttgaactgctcgggcgcggatttgcctggctggacactggcactcacgacagcctgattgaagccagcacctttgtacagacggtggaaaaacgccagggctttaagattgcctgcctggaagagatcgcctggcgtaacggctggctcgatgacgagggtgtgaagcgtgctgccagttcattagcgaaaactggctacggccaatatctgctggagttacttcgtgcccgtccgcgccagtattgagccactaacctgggaaaacgccttctttggtgttaacagcgccatcgtgcgcattacgtctgaagcaccgttcctgacgccagacgcgttagcgccgtggtcacgggtgcaggccaaaattgcggcatcaaatacgggggaactggatgccctgcaacagctgggattctccctggtagaaggtgaagttgatttggcgctacccgtgaacaatgccagtgatagcggtgctgtagtggcacaagagaccgatattcccgcattacgtcagttagccagcgccgcatttgcgcaaagccgttttcgtgcgccgtggtatgcgcctgacgccagcagtcgcttttatgcacagtggattgaaaatgccgtgcgcggcacctttgatcatcaatgtctgattttacgtgcggcgtccggcgatattcgcggttatgtctctttacgggaactcaatgctacagatgcgcgaattggcctgctggctggacgcggtgcaggtgctgagctgatgcaaacggcgctaaactgggcgtatgctcgcggtaaaacaactttgcgggtggngacccaaatgggcaacaccgccgcgcttaaacgatacatacaaagtggtgcgaatgtagaaagcaccgcgtactggttatacaggtgatcacatgattccatttaacgcaccgccggtggtgggaaccgaactcgactatatgcagtcggcaatgggtagcggcaaactgtgtggcgatggcggttttacccgtcgctgccagcagtggctggagcaacgttttggcagcgccaaagtgttactgacgccgtcctgcaccgcttcgctggagatggcggcgctgctgctcgatatccagcctggcgatgaagtgatcatgccgagctacacctttgtctccaccgccaatgcctttgtgctgcgtggcgcaaaaatcgtttttgtggatgttcgcccggacaccatgaacatcgacgaaacgttgattgaagcggcgatcnnnnnnnnnnnnngcgttatcgtgccggtgcattacgcgggcgtggcctgcgaaatggacaccattatggcgttggcgaaaaagcataatctgtttgtggtggaagatgctgctcagggcgtgatgtccacttacaaagggcgtgcactgggaaccattggtcatattggctgctttagcttccatgaaaccaaaaactacacggcgggcggtgaangcggcgcgacgctgattaacgataaagcgttgatcgaacgagccgagatcatccgtgaaaaaggcacaaaccgcagccagttcttccgtggtcaggtcgataaatatacctggcgcgatatcggctccagctatttgatgtccgatctgcaagctgcgtacctgtgggcgcaactggaagcagcggatcgtatcaaccagcaacgtctggcgctgtggcaaaactactacgatgcgttagcacctctggcgaaagccgggcgtatcgagctgccgtcgattcccgatggctgcttgcagaacgcgcatatgttttacattaaactgcgggatattgatgaccggagcgcgttgattaactttctgaaagaagcggaaatcatggcggtgttccattacattccgctgcacggttgccctgcgggggaacgctttggtgagttccacggtgaagatcgctacaccaccaaagagagcgagcgcctgctgcgcctgccgctgttctacaacctgtcgcccgtcaatcagcgtacggtaattgcgactttgttgaactacttctcctgatatgtcgttggcaaaagcgtccttgtggacggcggccagtacactggtcaagattggtgccgggttactggtcggtaagttgctggcggtgtcatttggtccggcggggcttgggctggcggcaaatttccgccagttgattaccgtgctcggcgtgcttgccggggctggcatctttaacggtgtaaccaaatacgttgcccagtaccatgataatccgcaacagctgcgccgcgtggtcggcacttcatcagcgatggtacttggcttctctacgctgatggcgctggtttttgtgctggcagctgcgccaatcagcctgggattgtttggtaatcacgactatcaggggctggtgcgtttagtggcgctggtgcaaatggggatcgcctggggcaacctgttactggcgttgatgaaaggctttcgcgatgccgcaggtaatgcgttatctctgattgttggcagcttgattggcgttcttgcgtactacgtcagttaccgtttgggcggatatgaaggggcgttgctgggtctggcgttgattcccgcgctggtggtgattcctgccgccgtcatgttaattaagcgtggtgctatcccgttaagctatctgaaacccagctgggataacggtctggcagggcagttgagcaaatttacgctcatggcgttgattacgtcggtgaccttgcctgttgcttacatcatgatgcgtaaactgctggcggcgcagtatagctgggatgaggtggggatctggcaaggggtgagcagtatttccgatgcctacctgcaatttattacggcatcgttcagcgtatatttgctgcccacgttgtcgcggctaacggaaaagcgcgatatcacccgggaagtggttaaatcgctgaaattcgtcttaccggcagtggcggcggcgagttttaccgtctggttgctgcgtgattttgctatctggctgctgttgtcgaataaatttaccgctatgcgcgatctctttgcctggcagttggtgggtgatgtgttaaaagtgggcgcttatgtctttggttatctggtgatcgccaaagcttcactgcggttttatattctggcggaagtcagccagttcactttattgatggtatttgcccactggctaatccctacgcacggcgcgctgggcgcggcacaggcatatatggcaacctatatcgtctatttttctctttgttgtggcgtgtttttactctggcgtaggcgggcatgactgtactgattcacgtactgggatcggatatccctcaccataaccgaaccgttttgcggtttttcaatgacgcgctggccgcgacgagcgagcacgcgcgcgagtttatggttgttggcaaggacgacggcttaagtgatagctgtccggcgctttctgtgcaannnnnnnctgggaaaaaatcgctggcggaagcggtcatcgcgaaagcaaaagctaaccgtcagcagcgttttttcttccacggtcagttcaatcccacactgtggctggctctgctgagtggtggcattaagcccagccagttttactggcatatctggggggcagacctgtacgagctttccagtggcttgagatataagcttttttacccactacgtcgcctggcgcaaaagcgagtcggctgtgtatttgccacccgtggtgatttgagcttttttgccaaaacgcacccaaaggtgcggggcgaactgctgtacttcccgacgcggatggatgcttctctcaatacgatggcgaacgatcggcaacgtgaagggaaaatgaccattctggtggggaactccggcgaccgcagcaatgagcatattgctgccttgcgcgccgttcatcagcaatttggcgatacggtaaaagtggtggtgccgatgggatatccgcctaataacgaagcgtacatcgaggaagttcgtcaggcggggctggagttattcagcgaagaaaatctgcaagttctgagtgaaaaactggaatttgacgcctatctgacgctacttcgtcagtgcgatcttggttactttatttttgcccgccagcagggcattggtacgctgtgcttactgattcaggcgggcattccttgtgtgcttaaccgggaaaatccgttctggcaggatatgacggaacagcatttaccggtgctgtttactaccgacgatctcaacgaggatattgtgcgtgaagcgcagcgccagttggcgtcggtggataaaaacaccattgccttctttagccctaactatctacaaggctggcagcgggcgttggcgattgccgccggggaggtcgcatgagtctgctgcaattcagtggcctgtttgttgtctggctgctctgcacgctgtttattgccacgctgacctggtttgagtttcgtcgtgtgcgctttaacttcaatgtattcttttcattgctgtttctgctcacctttttctttggcttcccgctgaccagcgtgctggtgtttcgctttgatgttggtgtcgcgccgccagaaatcctgttgcaggcgttgctttctgcgggctgcttctacgcggtttactacgtcacctacaaaacccgcctacgcaaacgcgttgctgatgtaccgcgccgtccgctgtttaccatgaaccgcgtggaaaccaatcttacgtgggtgatcctgatgggtatcgcgctggtaagcgtcggcatcttcttcatgcacaacggctttttgctgttccggcttaactcctacagtcagatcttttccagtgaagtctccggcgtggcgttaaaacgcttcttttactttttcatcccggcgatgctggtggtctactttctgcgccaggacagcaaagcgtggctgtttttcctcgtcagcacggtcgcctttggcttgctgacttatatgattgtcggcggcactcgcgccaatatcatcatcgcattcgctatcttcctgtttattggcattattcgcggctggatttcgttgtggatgctggcggcggcgggcgtgctggggattgttggcatgttctggctggcgctaaaacgctatggaatgaatgtgagcggcgatgaagcgttctatacgtttctctatctcactcgcgacaccttctcgccgtgggagaatctggcgttgctgttgcagaactacgacaacatcgacttccagggcctggcgccaattgtccgcgatttctatgtctttatcccttcctggctgtggccgggtcgcccgagtatggtgctgaactcagccaactactttacctgggaagtgctgaataaccactccggactggcgatctcgcctacgcttataggctcactggtggtgatgggcggcgcgttgttcatcccgctcggggcgattgtggttggactgatcatcaaatggttcgactggctgtatgagctgggcaaccgcgaaactaatcgctataaggctgcgatattgcacagtttctgctttggggcgatcttcaatatgatcgtgctggcgcgtgaagggctggattcgtttgtctcacgcgtggtcttttttatcgtggtcttcggcgcatgtctgatgatcgcaaaactgttgtactggctttttgaaagcgccggactcattcataaacgtacaaaatcatcgctccggacgcaggttgaaggataacaatgaataacaacaccacggcaccgacctatacgctgcgtggcttacagttgattggttggcgtgatatgcagcatgccctcgattatctgtttgctgacgggcagcttaagcagggaacgctggttgccattaatgctgaaaaaatgctgaccattgaagagaacgccgaggtcagggagttaattaacgctgccgaatttaaatatgcggatggcatcagcgttgtacgttcagtacgtaaaaagtacccgcaggcgcaggtttcccgcgttgccggtgccgatctctgggaagagctgatggcgcgcgcaggcaaagaagggacgacggtatttcttgtgggcggtaaacctgaagtgctggcgcaaactgaagctaaactgcgcaaccagtggaatgtgaatatcgttggcagtcaggatggttattttaaacccgagcagcgtcaggcgctgtttgaacgcattcatgccagcggagcgcaaatcgtcaccgttgcgatgggatcgccaaagcaggagatcttcatgcgcgactgccgtctggtgcatccagatgcgctgtatatgggcgttggcgggacttacgatgttttcaccggtcacgtaaaacgcgcaccgaaaatctggcaaacgctggggctggagtggctctaccgcctgctttcgcagccgagccgcattaagcgtcagcttcgtttgctgcgttatttacgctggcattacaccggcaacctctgattttcctctctttgtaaagcgacggagtggtcactccgtcgcctgtctgcttttttattacacaaagcattcaaatttttaatgctttatttgccatttctcctgaattacgaaaacatttncaacactcgatgtacccataacgataaccggtaacaccggaaagcatgcaaacacaacacgaggatttatggcagataacaaaccagagctacagcgtgggctggaagctcgacatatcgaactcatcgccctggggggcaccattggcgtcggcctgtttatgggggccgccagtaccctgaaatgggccgggccatccgtattgttggcctatatcatcgccgggctgttcgtctttttcatcatgcgttcaatgggcgaaatgttgttcctcgaaccggttaccggttcgttcgccgtttatgcgcatcgttatatgagcccgttctttggctatctcaccgcctggtcttactggtttatgtggatggcggtggggatctctgaaatcaccgccattggcgtttatgtccagttctggttcccggagatggcgcagtggatacccgcattgatcgcagtggcgctggtggcgttggcgaatctggcagcggtgcggttgtacggcgaaatcgagttctggttcgcgatgatcaaagtcaccacgattatcgtgatgattgtcattggcctgggcgtgattttctttggctttggcaatggcgggcagtcgattggttttagcaatctcacagagcatggcggtttctttgcgggtggctggaaagggttcctgaccgcgctgtgtattgtggtggcgtcctaccagggcgtggagctgattggcattactgccggtgaagcgaagaatccgcaggtgacgctgcgcagtgccgtaggcaaggtgctgtggcggatcctgattttctacgttggcgcgattttcgttatcgtcaccatcttcccgtggaatgaaataggcagcaacggcagcccgttcgtactgacttttgccaaaatcggtattaccgcagcggcgggcattatcaactttgtggtgctgacggctgcgctctctggctgtaacagcggcatgtacagttgcggacgtatgctctacgcactggcgaaaaaccgtcagttaccggcggcgatggcgaaagtttcccgtcacggcgtaccggttgcgggtgtggcagtatctattgctattctgctaattggctcatgcctgaactacatcattcccaatccgcagcgtgtgtttgtctacgtctacagtgccagcgtgcttccggggatggtgccatggtttgtgatattgataagccagctgcgttttcggcgtgcacataaagcggcgattgccagccatccgttccgctcaatcctgttcccgtgggccaactacgtaacaatggcattcctgatttgcgttttgatcggcatgtactttaatgaagatacgcgtatgtcgctgtttgttggcatcatctttatgctggcggtgacggcgatttataaagtttttggccttaatcgccacgggaaagcgcataaactggaggaataagcagcaaaacgcacaaacngtaaccaaacgcgcaatttatttaaaaagggactagacagaggggtgggaagtccgtattatccacccccgcaacggcgctaagcgcccgtagctcagctggatagagcgctgccctccggaggcagaggtctcaggttcgaatcctgtcgggcgcgccatttagtcccggcgcttgagctgcggtggtagtaataccgcgtaacaagatttgtagtggtggctatagctcagttggtagagccctggattgtgattccagttgtcgtgggttcgaatcccattagccaccccattattagaagttgtgacaatgcgaaggtggcggaattggtagacgcgctagcttcaggtgttagtgtccttacggacgtgggggttcaagtcccccccctcgcaccacgactttaaagaattgaactaaaaattcaaaaagcagtatttcggcgagtagcgcagcttggtagcgcaactggtttgggaccagtgggtcggaggttcgaatcctctctcgccgaccaattttgaaccccgcttcggcggggttttttgttttctgtgcatttcgtcaccctcccttcgcaataaacgcccgtaataactcattgccccacggtatgatttcgcccttaacgtattgaaggatgacttcaggcaaggagcgaccatgctgcaacaggttccaacgcgtgcttttcatgtgatggcgaaaccgagcggttccgattgtaatctgaactgtgactactgtttttatctcgaaaaacaatccctttaccgcgaaaagccagtcacgcatatggacgatgacacgctggaagcgtatgtccgtcactatatcgctgccagcgaaccgcaaaacgaagtggcttttacctggcagggcggcgaaccaacgctactcgggctggagttttaccgccgtgccgtggcgctacaggcgaaatatggtgctggcaggaagataagtaacagcttccagactaacggcgtactgctcgatgatgaatggtgtgcatttctggcannnnatcattttcttgttgggttatcgctggatggtccggctgagatccacaatcaatatcgcgtgacaaaaggcggcagacccacgcataaactggtgatgcgtgccctgacgctcctgcaaaaacatcatgtcgactataacgtgctggtctgcgtcaaccgcaccagcgcgcagcaaccgttacaggtttatgattttttgtgcgatgcgggagtcgaattcatccagtttattccggtggtcgagcgcctggctgatgaaacgactgcccgcgaaggactgaaactacatgcgcctggtgatattcagggggaactgacggaatggtctgtgcgccccgatgaatttggtgaatttctggtggcgatattcgaccactggattaaacgcgacgtcggcaagattttcgtgatgaatatcgaatgggcgtttgccaattttgtcggtgcgccgggtgcggtttgccatcatcagccaacctgtgggcgctcggtgattgttgagcacaatggcgacgtttacgcctgcgatcactatgtttatccgcaatatcgactggggaatatgcaccagcaaacaattgcagaaatgatcgattccccgcaacagcaggtgtttggtgaagataaatttaagcaattaccggcgcagtgtcgcagttgtaacgtgttaaaagcatgttggggaggctgcccgaaacaccgcttcatgctcgatgccagcggcaaaccgggactgaattatttgtgtgccgggtatcagcgttatttccgccatctaccgccatatcttaaagcaatggctgatttgctggcgcacggtcgcccggccagcgacattatgcaggcgcatttgctggtggtgagtaagtaaaaaancggccattttgtggtcgcctgcggttgattgccggnnnncggcgtaaacgccttatccggcctacatgatcgtgcaaattcaataaattgcagcgttctgtaggctggataagatgcgtcagcatcgcatccggcaaaggcagatctcagcgatagcgccggcttaatcannnnnnnnctgcgcgcgtggtggatactttttcaggatctccatatacgcgtgcatttcggtctgtagcggtacacccatcggaatatggcgcacgccgatagagtcgctntcctgcggatcggtgtagaggttaaacaccgacgatccggctgtttgcattactgtgccggtgaatccaccctgatatccgctctgggtataagcgtaaggttgctgaatcaggacgtgatacttgaattcatccatacgcacagcagcgagtttaccgttgaggaagtagtgctcggccttacggttagactgaccatttgttcccaggaagaaagatgtctggtccacaccatcgataaaggtggttttcggcactaaattcgccactttcgcaccaggatgccccgccagatccagtgctgttgggaagagatctgccagatcaacaataccgtcagatttacgcggttggatcatgcctttccagtaaacgaaagtcggtacgcgaacgccgccttcccaggtagctcctttcgcaccacggaacggtgtgcgtccgtgcggcggtacttcggcttccggtccgttatcggaggtaaagacaatcagcgtgttatcaagctgaccgtttttctccagtgctttatacagattagcgaacacatcgttcatttccaccatgcagtcgccatacgaggtgcgtgccggagagctacccgcatatttggcgttcgggtagttatcgaagtgacagccgcgagtgccgtaatagaggaagaaaggcttatcactcttcgccatcttgtcgaggaacttaacgccatattccatccagcgttgatccagatcttccatatatttcggcgtaatgtcggcaatggcctgttgttcgccgccgcgcaccgcatgaacgtcatctttgctaaatggtaattgcttgatgtattcagaacggtccggactcagggccacttccggattgacgtgagcgtcgcgccattcggtgtacatatcagacaccgagttaaagccacggaaatcatcaaagccaacgttctgcggctgcgactctttgttttcccccatatgccatttcccgatggcctgagtgacgtagccctgatcgtgcagcaactgcggcagcgtggttaacccttgcagcccgcccggttgcccgtacattggcggcatcagaatgccgtggtggatggagtattgtccggtgagaatggtggcgcgggttggggaagagcttggttgagaatacgccgaagttaaaatcagcccctggctggcaacggcgtcgatatctggtgtagggttacccaccgccacgccgccaccgttaaaaccgacgtccatccagcccacatcgtccagcaagaaaacaaccacattcggtttcttaccggtttttttctcaagttctgccagcttctgctgggtttctttatcctgcgccggatgctgcattactggcatcatgttgtcggcaatagtggtcgccggtttaaccagatactggtttgggtgatcgtatccggcaaagcctttgcgcgcggtggcagttgacggggtatctgctgcgctggccatgagaggaagagcggcggcgacagcaacaacaagaagtttgggtgaaaacgaaaattccatgcaaaatgctccggtttcatgtcaacaaaatgatgacgtaattaagcattgataattgagatccctctccctgacaggatgattacataaataatagtgataaaaataaattatttatttatccaagaaatgaatttaaaaatcaggagagcgttttcaatcctacctctggcgcannnnnatatgtaaggcaggtttattatatcgcgttgattattgatgctgtttttagttttaacggcaattaatatatgtgttattaattgaatgaattttatcattcataataagtatgtgtaggatcaagctcaggttaaatattcactcaggaagttattactcaggaagcaaagaggattacagaattatctcataacaagtgttaagggatgttatttcccgattctctgtggcataataaacgagtagatgctcattccatctcttatgttcgccttagtgcctcataaactccggaatgacgcagagccgtttacggtgcttatcgtccactgacagatgtcgcttatgcctcatcagacaccatggacacaacgttgagtgaagcacccacttgttgtcatacagacctgttttaacgcctgctccgtaataagagcaggcgtttttttatgtgtcaggaaggtcccggaggtgcttgcctccgggtgagaaggaactactgtggtgggttgttctgcaacgttaacatcaaaccgtcgcgacgcatcgctgcagcttcttccggcttgtgcagtctgtccagcgcgtcggcaagccatgcgtaatcgtaggcgtccggacgttgtttcagcgctgcgcggaaggcgagcgatgcttcctgccattctccgtgcttcatcagtgactggcccagtgtgctccacaacagcgggcgatcgccgacgtttttgatttgctggcgcagcactttttccagctgttccggattgtttgttttcagtcgaggaatcggcagcagtaggcgatcgtcgtactggcgtttcaggccatcgatgataatttgctgggcagtatcatgatcgtcacattcaataagatgttccgccattgccacctgcaacgctacctgatgacgcgttttccggctttggtttttccaccagttacgcaaaccttcgctaccgttatcggcacgcgcctgatccatcaggccaatccatgcctgttgttccagcattgcacgatgttcttcatcaccaacatgggctttcgccattgatgggataatatccagcagcgaactccatgcacctgtgcggatatacgcctgttccgccagacgtaatacttccggatggcgtggcgtaacttccagcagcttatccacgccgtggcgtgcagcatggttttcattacgggccagttgcagacgtacacgggtgatttctaccggaatggtgtcattgccggccagctccgctgcgcgttccagatgttggttggcgcgcgcttcatcaccacgttgttgcgcggcttcggcagccagtagatagttcaccaccggttgttcagcgtgatcggcatttttcgccatcagcttttcaacttgctgataatcgccttccgccagtttcagnagcgcctgttcggtctgcttacgtgcacggcgacgcttacgcccgacaaaccacccacgggtgtgcgcgccagtgcggaagatccgccgcagtagccactcaatggcaaacagcactaccatcgccagaatcaatatgatcgccaggcccgtgacgctggtttcgatattgtagttgtcggtctggatcagcacataaccctgatgaccggcaatcatcgggccaaccacgatccccgcaatcagcaacacaaagagcaataacacttttagcatggttattctccttgcggcgcggctgccggagtatcagcttgcggtgcaggtgcaggtttagcttccgttgtccccgctgccggttgtgccagcaggttacgcacgcgagtctgcatcagtttttccagcatcgcctggctttgcagggtttccggaagatccatcgagatattttgctggcttaactggtctacctcgtcgaggaacgctttggtggtggcatcatcagtatcgtagtaagcacgtacccaggtggagacgttctccagcgcctggcgataagtctcttgctggtgacgcggtacagcttgtgctgcgaccagcaggcgagagcgaatattttcgcgcagatagatatcctgatttggcgctaacagcggtacggcggtgtcatcacgacggcgaatcgtaatgaagttgtccataaagttctgccagcttttttgcagattgatacgccattcgctgatggaactggaaagctcttcaccgtcggaatccatcggcgaaccatcgctgtcattatcggccagacgcaggttatctacctgatttgaaagctgattaagcttaaggatgatgccgtcataatccacctgcgatactgcagaaaggctggcgatatcatcggtaattgcccgacgaacggtaatcagactcgggtcattcatatccgccaggctggcgtctgcacttttcagcaacgctgcagcggtcgtgacgtcctgatcgctccacagcttccgtccggcgagtttcaccagaaaatcggcctgagccagcagccaggttttagcatcgctgccggaaatggtggcgaccttttgttggacttcatccaactgttttgccagcgtttcttgctgacgattcgcctgcttaagctgtgcagcttgttgcttaataatgccttccagctcgactttttggctctcctgggctttttgcaatgccgtcagttggttagccagggcatcgctggtggcggtctgattgacggcctgttgtttaccccagccatacaaaccgacgcccgccgccagagcaatagcgatagccaccgcgctgagaatcaatgcggtattgttcttactctttttttctgttgcgacaggttgtgacgtggtgtccacggcctccctggtctcttcaaccacggcggaggttttttcttgttccgtcattatggcttcctgttatgagagttattgtaatgcccgtaaaagcgcatcgttgtcagcgttatcggcgaccttaatgtcttgccagcccagttcccgggcgagtttcgccaaacgctcactgacgaccaatagtcgacagtgtagtaaccagtgctcacgataccattgtgggatcagcgaccagagttgctgcaacatttcaccgctggtaacaacgaccgtcgtcacctcgcgggattgccagcgcatcgcttcttctgcaccatcgtaatggattgcgcatcgttgataacattcacaaaaagtgacctcagcaccgcgcgccgtcagggtatccccaattagctcacgaccgccattgccacgtaatatcagcgcacgtttgcccgcaatattttgtaattcaggtaattgtagcaagacttcgctgatttcccgatcctgcgggtagagaatcttctgtccgcttacggtatgtagtgccagtgcggtggtgcgtccaatggcgaaataattaggtagtcggggccatttacgatcttgctgatgtagctgtgattgggcaaaagcaaccgcgtgttgcgagagggcaaacaacagatcgctctcccccagcgctgccagttgatcagcaagttgcggtaattgtcgacccggagaaaactcaatcagcggaaaatgccaggccacctgccccagtgtgcgcagacggctcactaactcttctccagcgggagacgggcgggtgacaaggatactcatgccggggcgtctccgttatagacttcagcgaggatctcgcgcgcgccgttattcagtagctcttctgccagcgaaatccccatttgttcggcatcttgcggcgcaccgcggcgttcaccgcgaataatctgcgaaccgtcnnnngcgccgaccagcgcacgcagccagatttcgccatcaataagctcggcgtagctaccaattggcacctgacatccaccttcgagacgggtattcatggcgcgttctgcggtaacgcgcagtgcagtttcgtggtgattcagcgcggcaagcagctcgcgagtgcgtgtatcatcaaggcggcattcaataccgactgcaccttgtcctaccgccggaagagaaatctcgggtggcaacgcggcgcgaatgcgggactccagacctaaacgttttagtccggctacggcaagaatgatggcatcgtattcgccgttatccagtttgctcaggcgagtgccgacgttgccgcgcagggagcggataatcagatccgggcggcgttcagccagttggcactggcgacgtaaactggacgtcccgacgatactgcctgccggtaacgcatccagactgtcatagttattggacacaaaggcatcgcgaggatcttcacgctcacaaatagtgaccaggcccagaccgtgcgggaattcaaccggcacatctttcattgaatgtacggcgatatcggcgcgattttcgaggagcgcgacttccagctcttttacaaataagccttttccgccgactttcgccagcggcgtatcaagaatcacatcnccgcgcgtcaccatcggtaccagttcaacgaccaggcccggatggctcnccatcaacttgtctttgacatagtgtgcctgccagagtgcaagtgggctttggcgtgtggcaattcttaaaacattgtctaacatgcttgtnaccgtcattatcatccgtggtccatcctaacatccttgccagagtgatgtcagtgttgtggtgaaacgtagacgcctgcgcaaaccgtaaaatgaggtctggcagtggatcctgacaggcgtttcacgccgtcgtaataaggaatttacagagaataaacggtgctacacttgtatgtagcgcatctttctttacggtcaatcagcaaggtgttaaattgatcacgttttagaccattttttcgtcgtgaaactaaaaaaaccaggcgcgaaaagtggtaacggttacctttgacatacgaaatatcccgaatgccgcgtgttaccgttgatgttggcggaatcacagtcatgacgggtagcaaatcaggcnnnnacgtcttgtacctctatattgagactctgaaacagagactggatgccataaatcaattgcgtgtggatcgcgcgcttgctgctatggggcctgcattccaacaggtctacagtctactgccgacattgttgcactatcaccatccgctaatgccgggttaccttgatggtaacgttcccaaaggcatttgcctttacacgcctgatgaaactcaacgccactacctgaacgagcttgaactgtatcgtggaatgtcagtacaggacccgccgaaaggtgagcttccaattactggtgtatacaccatgggcagcacctcgtccgtagggcaaagttgttcctctgacctggatatctgggtctgtcatcaatcctggctcgatagcgaagagcgccagttgctacaacgtaaatgcagcctgctggaaagctgggccgcctcgctgggtgtggaagttagcttcttcctgattgatgaaaaccgttttcgccacaacgagagtggcagtctggggggcgaagattgtggctccacccagcatatactgctgcttgatgaattttatcgtaccgccgtgcgtctcgccggtaagcgtattctgtggaatatggtgccgtgcgacgaagaanagcattacgatgactacgtaatgacgctctacgcacaaggcgtgctgacgccaaatgaatggctggatctcggcggcttaagctcgctttccgctgaagaatacttcggtgccagcctttggcaactctacaagagtatcgattctccatacaaagcggtgctgaagacactgctgctggaagcctattcctgggaatacccgaacccacgcctgctggcgaaagatatcaaacagcgtttgcacgacggcgagattgtatcgtttggcctcgatccttactgcatgatgctggagcgtgttactgaatacctgacggcgattgaagatttcacccgtctggatttagtacgtcgctgcttctatttaaaagtgtgcgaaaagctcagccgtgaacgcgcctgcgtangctggcgtcgcgcagtgttgagccagttagtgagcgagtgggggtgggacgaagctcgtctggcaatgctcgataaccgcgctaactggaagattgatcaggtgcgtgaggcgcacaacgagttgctcgacgcgatgatgcagagctaccgtaatctgatccgctttgcgcgtcgcaataaccttagcgtctccgccagtccgcaggatatcggcgtgctgacgcgtaagctgtatgccgcgtttgaagcattaccaggtaaagtgacgctggtaaacccgcagatttcacccgatctctcggaaccgaatctgacctttatttatgtgccgccgggccgggctaaccgttcaggttggtatctgtataaccgcgcgccaaatattgagtcgatcatcagccatcagccgctggaatataaccgttacctgaataaactggtggcgtgggcatggtttaacggcctgctgacctcgcgcacncgcttgtatattaaaggtaacggcattgtcgatttgcctaagttgcaggagatggtcgccgacgtgtcgcaccatttcccgttgcgcttacctgcaccgacaccgaaggcgctctacagcccgtgtgagatccgccatctggcgattatcgttaacctggaatatgacccgacagctgcgttccgcaatcaggtggtgcattttgatttccgtaagctggatgtcttcagctttggcgagaatcaaaattgcctggtaggtagcgttgacctgctgtatcgcaactcgtggaatgaagtgcgtacgctgcacttcaacggcgagcaatcgatgatcgaagccctgaaaactattctcggcaaaatgcatcaggacgccgcaccgccagatagcgtggaagtcttctgttatagccagcatctgcgcggcttaattcgtactcgcgtgcagcaactggtttctgagtgtattgaattgcgtctttccagcacccgccaggaaaccgggcgtttcaaggcgctgcgcgtttctggtcaaacctggggcttgttcttcgaacgcctgaatgtatcggtacagaaactggagaacgccatcgagttttatggcgctatttcgcataacaaactgcacggcctgtcagtgcaggttgaaaccaatcacgtcaaattaccggcggtggtggacggctttgccagcgaagggatcatccagttctttttcgaagaaacgcaagatgagaatggctttaatatctacattctcgacgaaagcaatcgggttgaggtgtatcaccactgcgaaggcagcaaagaggagctggtacgtgacgtcagtcgcttctactcgtcatcgcatgaccgttttacctacggctcaagcttcatcaacttcaacctgccgcagttctatcagattgtgaaggttgatggtcgtgaacaggtgattccgttccgcacaaaatctatcggtaacatgccgcctgccaatcaggatcacgatacgccgctattacagcagtatttttcgtgatgaacgtgccggaaagcgaggcttatccggcatgcaatcttagcggaaactgactgtttcacccgcctgctgcgtcgccgcctgttccagcaaatcccagaaggtttcgccgctgcgatcgcaaatccactcatcgcctttcagatcaaaatggtagccgccttgtttggttgccagccatacctggtgcagcggttcctggcggttgataatgattttgctgccattctcaaaggtaatggtcagcacgccgccgttgatttcgcagtcgatatcgctgtcgccatcccagtcgtccagacgctcttcaatggtcagccacagttgatcagccaggcgatgaaattcactgtcgttcattgttgtatcctgtttttaagtgatggcggcagtatagcggcatggggtcagggcttcaaagtttgcacctctgcggctgcgttacggcatgattcatccgtcaccggaataatgatgtctctgtgtagcgaaagatttgtctcttcattagggcgcagttacaccacgcctttccctgtttctggtaaacattatgatcaggtttaccgagcgagcatcctcacgctgacggaactaaaaaagccaacaaacaaaccacattgcgatagtgcataaagccatcctggcgtgaggtgttgatcacgaaactgccagcagaacataaatcctcacgagtaagcgttatactcgcagcatttcctcacttttcagacttcataaagagtcgctaaacgcttgcttttacgccttctcctgcgatgatagaaagcagaaagcgatgaactttacaggcaatccataatgaaaaacgtgtttaaggcactcactgtattacttactctcttcagcctgacgggctgcggtctgaaaggtccgctctatttcccgcctgcagataaaaatgcaccgccgccgaccaaaccggtagagacgcaaacgcaatccacggtgccggataaaaacgatcgcgccactggcgatggtccatcccaggtgaattactaaaagtcagtttctgtacccgcgtgattggagtaaatgatgcagttntcgaaaatgcatggccttggcaacgattttatggtcgtcgacgcggtaacgcagaatgtctttttttcaccggagctgattcgtcgcctagctgatcggcacctgggggtagggtttgaccaactgctggtggttgagccgccgtatgatcctgaactggattttcactatcgcattttcaatgctgatggcagtgaagtggcgcagtgcggcaacggcgcacgctgctttgcccgttttgtgcgtctgaaagggctgaccaataagcgcgatatccgcgtcagcaccgccaacgggcggatggttcttaccgtcaccgatgatgatctggtccgcgtaaatatgggcgaacccaacttcgaaccttctgccgtgccgtttcgcgctaacaaagcggaaaagacctatattatgcgcgccgccgagcagacaatcttatgcggcgtggtgtcgatgggaaatccacattgcgtgattcaggtcgatgatgtcgatactgcggcggtagaaacactggggcctgttctggaaagccacgagcgttttccggagcgcgccaatatcggttttatgcaagtggttaagcgcgagcatattcgtttacgcgtttatgagcgtggggcaggagaaacccaggcctgcggcagcggcgcatgtgnggcggttgcagtagggattcagcaaggtttgctggccgaagaagtacgcgtggaactcccaggcggtcgtcttgatatcgcctggaaaggtccgggtcacccgttatatatgactggcccggcggtacatgtctacgacggatttattcatctatgaagcaaccaggggaagaactgcaggaaacactcacggagcttgatgaccgggtggttgtcgattatctgattaaaaatcctgagttttttatccgcaatgcnnnnncagtagaagcgatacgtgtgccgcatccggtacgcggtaccgtttcgttggtcgagtggcacatggcccgcgcacgtaatcatattcatgttctggaagagaacatggcgctgttgatggaacaggctatcgccaacgaaggcctgttttatcgcttactctacctgcagcgcagtctcaccgccgccagcagtcttgatgatatgctgatgcgctttcaccgcngggcgcgtgatctcggcctggcaggtgcgagtctgcgcctgtttccggatcgctggcgnnnnnntgcgccgtcgaaccacactcatctggcattaagccgtcagtctttcgaaccgctgcgtattcagcgtctggggcaggagcagcattatctggggccgcttaacggaccggagctgctggtggtactaccggaagcgaaagcggtgggatcggtggcgatgtcgatgctgggaagcgatgctgatttaggcgtggtgctgttcaccagccgcgatgccagtcactatcaacaagggcagggaacgcagttacttcatgaaattgcgctgatgttgccggagcttctggagcgttggattgaacgcgtatgaccgatttacacaccgatgtagaacgctacctacgttatctgagcgtggagcggcagcttagtccgataactctgcttaactaccagcgacagcttgaggcgatcatcaattttgccagcgaaaacggcctgcaaaactggcagcaatgcgatgcagcgatggtgcgcaattttgctgtacgcagtcgccgtaaagggctgggcgcggcaagcctcgcattacgcctctctgcgctacgtagcttttttgactggctggtcagccagaacgaactcaaagctaacccggcgaaaggtgtttcggcaccgaaaacgccacgtcatctgccgaaaaatatcgacgtcgatgatataaatcgcctgttggatattgatatcaacgatcccctcgctgtgcgcgaccgtgcaatgctggaagtgatgtacggcgcgggcctgcgtctttccgagctggtggggctggacatcaaacacctcgacctggagtccggcgaagtgtgggtgatggggaaaggcagcaaagagcgccgcctgccgattggtcgtaacgctttgtcatggattgagcactggcttgatttgcgcgacctgtttggtagcgaagacgacgcgctttttctgtcgaaactgggcaagcgtatctccgcgcgtaatgtgcagaaacgctttgccgaatggggcataaaacaagggctgaataatcacgttcacccgcataaattacgtcactcgttcgctacgcatatgctggagtcgagcggcgatcttcgtggtgtgcaggagctgctgggtcatgccaacctctccaccacgcaaatctatactcatcttgattttcaacaccttgcctcggtgtacgatgcggcgcatccacgcgccaaacgggggaaataatgcgtttttaccggcctttggggcgcatctcggcgctcacctttgacctggatgataccctttacgataaccgtccggtgattttgcgcaccgagcaggaggcgcttacctttgtgcaaaattaccatccggcgctgcgcagcttccagaatgaagatctgcaacgcctgcgccaggcggtacgggaagcggaacccgagatttatcacgacgtgacgcgctggcgttttcgctcaatagaacaagcgatgcttgacgccggattgagcgcggaagaagccagtgcaggcgcacacgcggcaatgatcaactttgctaaatggcgcancaggatcgacgtcccgcagcaaacccacgacaccttaaaacagctggcgaagaaatggccgctggtggcgatcaccaacggtaacgctcagccggaactgtttggtttgggggattattttgagtttgtgctgcgcgctggcccgcacgggcgctcgaaaccgttcagcgatatgtacttcctggcggcggaaaaactcaacgtgccgatcggcgagatcttacatgtaggtgacgatctcaccactgacgtgggtggggcaattcgcagcggaatgcaggcctgttggatcagaccggaaaatggcgatctgatgcaaacctgggatagccgtttactcccgcatctggaaatttcccggttggcatctctgacctcgctgatataatcagcaaatctgtatatatacccagctttttggcggagggcgttgcgcttctccgcccaacctatttttacgcggcggtgccaatggacgtttcttacctgctcgacagccttaatgacaaacagcgcgaagcggtggccgcgccgcgcagcaaccttctggtgctggcgggcgcgggcagtggtaagacgcgcgtactggtgcatcgtatcgcctggctgatgagcgtggaaaactgctcgccatactcgattatggctgtgacgtttaccaacaaagcggcggcggagatgcgtcatcgtatcgggcaactgatgggcaccagccagggcggcatgtgggtcggcaccttccacgggctggcgcaccgtttgctgcgtgcgcaccatatggacgccaatctgccgcaggatttccagatcctcgatagcgaagaccagctacgcctgcttaagcgtctgatcaaagccatgaacctcgacgagaagcagtggccgccgcgccaggcaatgtggtacatcaacagccagaaagatgaaggcctgcgtccgcatcatattcaaagctacggtaatccggtggagcagacctggcagaaggtgtatcaggcgtatcaggaagcgtgcgatcgtgcaggcctggtggacttcgccgagctgctgctgcgcgctcacgagttgtggcttaacaagccgcatatcctgcaacactaccgcgaacgttttaccaacatcctggtggacgaattccaggataccaacaacattcagtacgcgtggatccgcctgctggcgggcgacaccggcaaagtgatgatcgtcggtgatgacgaccagtcaatctacggctggcgcggggcgcaggtggagaatattcagcgtttcctcaatgatttccccggtgccgaaactatccgtctggagcagaactatcgttctaccagtaacattctgagcgccgcgaacgccctgattgaaaacaacaacgggcgtctgggtaaaaaactgtggaccgatggcgcggacggtgagcctatttccctctattgcgcttttaacgaactcgatgaagcgcgttttgtcgttaaccgcatcaaaacctggcaggacaacggtggggcgctcgccgagtgcgccattctctaccgcagcaacgcccagtcgcgggtgctcgaagaggcgttattgcaggccagtatgccgtaccgtatttacggcgggatgcgcttcttcgaacgccaggaaatcaaagatgcgctntcgtatctgcgcctgattgccaaccgcaacgacgacgcggcctttgagcgtgtggtgaatacgccaacgcggggtattggtgaccggacgctggacgtggtacgtcagacatcgcgcgatcgccagttaacactctggcaggcatgtcgtgaactgttgcaggaaaaagccctcgccggacgtgctgccagcgccttacagcggtttatggaactgatcgacgccttagcgcaggaaactgccgatatgccgctgcatgtacagactgaccgggtaattaaagactccggcctgcgtaccatgtacgagcaggagaagggcgaaaaaggtcagacgcgtatcgaaaacttagaggaactagtgacggcaacgcgccaattcagctacaacgaagaagacgaagatttaatgccgctgcaggcgttcctctcccatgcggcgctggaagcgggcgaggggcaggcggatacctggcaggatgcagtgcagttgatgacgctgcactcggcgaaaggcctggagttcccgcaggtgtttatcgtcggtatggaagagggcatgttcccaagccagatgtcgctggatgaaggcggacgtctggaagaagaacgccgtctggcctacgttggtgtaacccgcgcgatgcagaaactgacgctgacctacgcggaaactcgccgtctgtatggcaaagaggtttaccatcgcccgtcgcgctttatcggtgagttgccggaagagtgtgtggaagaggtgcgcctgcgcgccacggtaagccgcccggtcagccatcagcgtatgggtacgccgatggtcgagaacgacagcggntacaagctcggccagcgtgtacgccacgctaagtttggtgaaggcactatcgtcaatatggaaggcagcggcgagcatagccgtttgcaggtggcattccagggccagggtattaaatggctggtggcggcatacgcccggctggagacggtataacgttgcgggatgcggtgcgccacaccgcatccggcatcagcaccttacttatcacatttcttcacatcaatattccagtcagcaccagacgcaacctgatgtttctgcgcgaaattatccatattcagcgccacggaaacattcaataagctgttcagatacaccatcggctgtccttccggcacatcgccgaagcttgcgacatacggcattttccctgcgtatttttgccgggaaccttcggaaatggtcacacacaacgtgtcgttgagtttgatccccgcctgattcagcaactcgtcgctgatattgctccagacgttgccgtactgaatatcgagaatcgggatattgcccttcacttcaccttttgttgcttttgctttctgataagaaagttcgacaacctttgcaggaagctcaggccccacctgntcgaacgtgatcgccccggaagccagacgtgcaccggtgtaggcatacacgtcacgaccgtggaaggtatatgacttttcagaacctttcaggcggttagctttttcgtcgatttcccggacgctctcaatacccagcgattccgccaccaaagtgagcgtaccgttatccggtgaaacgaagtattgaccgtttttggttttcagcactatcgatttacggtcagtgcctacgcccggatcgaccacactgacaaataccgaaccttgcggccagtaactggcggtctgatacaggcggtaagcgccttcccagatgttatacggtggaatttcgtgtgttaaatcaaatattttaagattatggtcaacaccgaatgcgacccctttcatcgccgagacggcaccatctttcaggctaaaatcagtttgtaaaatcaaagcgttatccgcataagcggatgatgatcccagacacgttaataaaaataannntgcgagcgtttttttcatttttgtttcccttcatttatctgatgattttccagctgtgtagccagccccagtttgtctggcctcctcgagtgtacaatgcttaacctttccgctcgacggaaatcatggtgacaaaaggatagcgttgccacgggattgccccgcctttcatatacatatgtgaaatcgtgccatcaagataaagcagctgctcaacgttcagtttcgctttggcataacaggcaaaatcataaaaatttgtcgcctgctggctcaacaaaaacacggcattcccatgtttattaattccaacaccgttacgaattttacgtgaggcgacgttgggatgaatacgcggattaattacactgttttccatcaacattggccctgactgcaccgcaaactgaatctctttactggttttgaaggcatccagacgaacgatgccgactttatctcccgcgacataaaacacgccgccaggacggataaagaaattcccttcacctgaagcgagatttaacgccaccttctgctgaccgttttcgatgtacaaaccgagcggcgcatagctttcatcatagatgccgccgttcatcgccatctgcacctgaccctgactattcatatccgccagcagagcatgtaaagttccccacgcttcgccattggctttttgccagtacattttcacccgctctgtttgaggattaacggtatacgcctgtacggtcagcgttggatctgagagtgcgcaatcatcagcggcaacagcaaacaagggaagtaaggtgagggcgagaaaaatccgtttgagattcaaggtgatcattcctttaccaatgagtagccgatgcgccattataggtcctggatgtgggatttttttatcctgttagcgaccttgacgagtaccaaaaagcgcgaagttcaactattgttctgtggtgttctgttgcgtgttgacggcaaannnnnnntggcgtaacatgcgcgcacgatcactctaagaggacattcgccttggacacacccagtagatactggctcactatcctgtcatccaggatcaactcctaaggctatccctttttgctgatagccttagcggttgtcagcgacctcaatttttcccgtcgcgctgagtcaggctgtttaatggtctgaaacccaatttgtttctgtgtgcccaccgaactgtccgatattttaagcattgggagtcccggtcatgctgagcgcatttcaactggaaaataaccgactgacccggctggaagtcgaagagtcacaaccccttgtaaatgcagtatggattgatcttgtcgaaccggacgacgacgagcgactgcgcgtacaatctgaacttggccagagcctggcaacccgcccggaactggaagacatcgaagcatcggcacgtttctttgaagacgatgacggcctgcatattcactccttcttcttctttgaagatgcggaagatcacgccggtaactccactgtggcatttaccatccgtgatggtcgtctgtttactctgcgtgagcgtgaactgcccgcttttcgtctgtatcgtatgcgtgcccgtagccagtcgatggtagacggtaacgcctacgagttgctgctggatctgttcgaaaccaaaatcgaacagttggcagatgaaattgaaaatatctatagcgacctggagcaattgagccgggtgattatggaagggcatcagggcgatgagtacgacgaggcgctctccactctggcggaactggaagatatcggctggaaagtgcgcctgtgtctgatggatacccagcgcgcgctcaacttcctggtacgtaaagcacgcttaccgggtgggcaactggagcaggcgcgtgaaatcctgcgagatatcgaatccctgctgccgcataacgaatccctgttccagaaggtgaacttcctgatgcaggcggcaatgggttttatcaacatcgagcagaaccgcatcatcaaaattttctcggtggtatccgtcgtgttcctgccgccaacgctggttgcttccagctacgggatgaactttgagtttatgccagaactgaagtggagtttcggctacccaggcgcgattatctttatgatcctcgcgggcctggcaccgtatctgtactttaagcggaagaactggttgtaatatgagtgccggataaagctatttttttatccggcttatttctaaaaattgtcttttttaaagtcatgcggattgaaaacttgctctattttattttcttgtgttaattgatactcagtaaaatcgttaataccaatatgagtgttacgataagggtattcattaataaccattaagtaatttttcgtgatgcaattatcattgctcttaattgtcgggaaacagtagagatcttcatacggcccttcgatatattttttatagtcagtgaagccattaccgatatcaatgacataccaggtatgccaactaccttctggtaggggatgttgatttttaatttcattctgatgcttcagataccaatttattttatcgctgtcagtccatggcagatgatcaacgaccagaaagactgaattgccagcatcagagtatgtatacaaaatctgtacaggacgcaatgtccataaattatagatgcagcatagaagaaataaacataatataattttttggagtttgcttttcatagataattttcgattctttcgatagtgttaaaattggtgaaaaaaggtttgaaagcaaagtctttatgccgttgtaaaaagaaccatatgcgaaaaaatctatatttgctgtaagtcttgtttttgatatcagttacatcaagaccgaagtggtcctgtgctacaaaatgaattgttgcactccatcctatagcgtatttttgaaaacttaaaagagatattttttgagctgaaatatcatgaacactgattcctaagccattaaaactgtcctcgaagtcattaaatttntttagtcttgatgaaagtaatttggttttaatgctttgcaggataagaggttggtatcctgtcgagggagttgaattaatgccattttcgatacattctttgattattcgtattggactattataaccatatttatttattttttcatgaaaagataaatttaattgttggctatgaaaattgctgccatttccatatctaaaatgttcaatcagatctttgataagtgttttatattgtccaaaaaaggaaaacatttttgctagttctttcatttctgcaaataaaatatcagtgcattcacgttgtgatatttttgttccggaacttgaggcactaaaagcaacattaatagaacctgggccagggaaatggtatttaataagtctgtaaggatcaacttttgctgagatatcgcttaggccgagtgagagaaaatcttgttctaccatatcaccatattgcatatcatcagcagaataattatcaaataaactaatagtttcgaaaagtgtacagggaatattaattgatggaagtaatgtgttattcatttacattttccttggttatatttaagctcaatatcaatttgagaacaaatgctagggtaaaaaaatatttaaaaaagaagtacacttcacattttttcattacatctctgaagagaacgtcgttaatgattggtcttgctcattgttaataacaaaatnttgaatttaccgattaggaaactttttcctacgccgattgcctccagctatggcatgaactttgagtttatgccagaactgaagtggagtttcggctacccaggcgcgattatctttatgatcctcgcgggcctggcaccgtatctgtactttaagcgcaagaactggctgtaactatacgatgtcgctgtgagtaagttagtgtgctgacagcgacattttagcagagggaatcgcagataacataattgttgtgaataatatccatgccacgttgagttggacgcttaatgactcacatctcaccccttcaattgctgcagagataatagaaaaaagtgtcaaacccaatgaaatcaatacaaagtagattgccttacatccagtatctcttattctttttgctccaatattgatatttacataggtattattaataaccagaataaaactcaaagccaggttgatatcattcaaagttattaatattgaccatgatgttaatgtatagattatgaactgaaagcgtgataaacgctcaagcttggatgggtagaatatatttctgatggatgatttgaacattttttacattgttttatatatataattgttttgaatatatattacctgaattatgtggtttgcatatatatatgcaatatagcagtctttgcattgataactatacagtagtaatttagagtgtgtaagtttttattgatggggtatattnnnattaaatataattggaatgtatttttattctataaacaatatcttgggtgaatggattctatatgggaaatggtaacttttggcagttgttcttgggtaaagaaccttacagcaaaaaatctgattttgttaaggcatggttattgtggtgggctattaccatccttgttctatttattttaagcctgactacgacattaaatttaagaagtataggtatagggttaagttttgggttttgtcaaatccttggtagatatacgatgtctctaggatggagtaagtactggggagttttgggggtatttcctgtaacaaatattgttctttttcttatcttaattttnnnnnnnaaaagataaataagtcagtgggtaggctctttaaacggcctacccatgttaattcttaactttttctacgctgcgtataaatcgcatccatcacaaaaattgccagcgccacccaaataaaggtgaaagtcaccatcttatcggcacccggtttttcaccataaaacgtcacagccagcaggaacatcagcgtcgggccaatgtactggaaaaagcctaacgttgagagacgaaggcgcgtggcagcggcggtaaaacacaacagcggtacggtagtgacaataccggcggcgatcagcagtaaattcagcgacatcgggttttgccccatatggctggttgagctgtcggcaatagcaaacaggtaaatcgccgccacgggcagcagccacatggtttcaattaacatgccggtttgtgcttctaccgcaatcttcttgcgcaccaggccgtagaaggcaaaactaaatgccagccccagcgcgataataggtagcgaaccaaaagtccacagctggactaacacgccacatatcgccagaatcaccgccagccattgcatccggcggaatcgctcgccgaggaaaatcatccccagcacaatgttcaccagcgggttaataaagtaaccaaggctcgcttccagcatatggtgattgttcaccgcccagataaacagtagccagttgccaccaatcagcacggcagagactgccagcataaaaattttctgtggcgtctgaatcagcgtttttaaataggaccactggcggcaaatgctcatcagcaccaccataaagaaaaacgaccagatcacgcgatgcgtcaggatctcatcggcgggcacgtagtaaatcaacttgaagtacgctggggctataccccaaataaaataagcggcaagagcgagtaatacgccctgccgcgtttgttttgcatccatcgggaatactcatttttaattggtaacagcagtttacctgcttttatgtcttcaacctaccatataggtggcggtggcactggcaatataaagctgttcttcattgtgtaattcaacgcgggcgacggcgactttattgcctgcacgcaacaggctactggtagcagtaaaacgctcgcntctgcctgggcgcagataatcgacgcgaagatcaatggtccccatccgcgatagccgctggcgtagttcatcttcactgatggttttgtggcgggttaaggtacttcctacgcacaccagaccggcggcgacatccagcgccgacgcaatgaccccgccgtgcaaaatgctttgcgcccagttgcccaccatcattggctgatttttaaaggccagctgtgcgaactctttttcgtaacgctccagttccatccccaatgcgcggttaaatggcatgtgataaacaaacatctcacccactaatttcagggcttgttcagcggtcagtacggcagacatatcatccttacacttcattggttaatgaaatgttgattttatgcttctttgttgttggtttctactttaggaagggataactaacggcaatggagttaagtatgtaaaataccccgcagaaaaacattcaccttatcaataattcgttacggagaacacgaccgatgcggactctgcagggctggttgttgccggtgtttatgttgcctatggcagtatatgcacaagaggcaacggtgaaagaggtgcatgacgcgccagcggtgcgtggcagtattatcgccaatatgctgcaggagcatgacaatccgttcacgctctatccttatgacaccaactacctcatctacacccaaaccagcgatctgaacaaagaagcgattgccagttacgactgggcggaaaatgcgcgtaaggatgaagtaaagtttcagttgagcctggcatttccgctgtggcgtgggattttaggcccgaactcggtgttgggtgcgtcttatacgcaaaaatcctggtggcaactgtccaatagcgaagagtcttcaccgtttcgtgaaaccaactacgaaccgcaattgttcctcggttttgccaccgattaccgttttgcaggttggacgctgcgcgatgtggagatggggtataaccacgactctaacgggcgttcagacccgacctcccgcagctggaaccgcctttatactcgcctgatggcagaaaacggtaactggctggtagaagtgaagccgtggtatgtggtgggtaatactgacgataacccggatatcaccaaatatatgggttactaccagcttaaaatcggctatcacctcggtgatgcggtgctcagtgcgaaaggacagtacaactggaacaccggctacggcggcgcggagttaggcttaagttacccgatcaccaaacatgtgcgcctttatactcaggtttacagcggctatggcgaatcgctcatcgactataacttcaaccagacccgtgtcggtgtgggggttatgctaaacgatttgttttgatgaacggttgagtggttggcaaatctggaatccagcatccaggattaccctctcagagactaaaagcattgcagtttctcgcgcaggcgctgannatagcgcctgtttttatttcaggcaatcggggtgaatgtggcgcaggcggaagtgttgaatctggagtccggagctaaacaggttttacaagaaacctttggctaccaacagtttcgccccggccaggaagaaattatcgacactgtgctttccggtcgcgattgcctggtcgtcatgcccaccggtggcggaaaatccctttgctatcaaattcctgccttattgctaaacggccttaccgtggttgtttcaccgctgatttcgttgatgaaagatcaggtggatcaactgcaagccaacggcgtggcggcggcgtgccttaactcgacgcaaacccgcgaacagcaacttgaagtgatgacaggctgccgcaccgggcaaattcgtctgctttatatcgccccggaacgcttgatgctggataactttcttgagcatctggcgcactggaatccggtgttattagccgttgatgaagcgcactgtatctcccaatggggccacgatttccgcccggaatatgccgcgctcggtcagttgcgccagcggttcccgacgctgccgtttatggcgctgaccgccacagccgacgacaccacgcgccaggatatcgtgcgcctgctggggctgaacgatccgctgattcaaatcagcagttttgaccgtccgaatattcgctacatgctgatggagaaattcaaaccgctcgatcagttgatgcgctacgtgcaggaacagcgcggtaagtccggcattatctactgcaacagccgggcgaaagtagaagacacagctgcgcgcctgcaaagcaagggtattagcgcggcggcctatcatgccgggctggaaaataatgtccgcgccgacgtgcaggagaaattccagcgcgatgacctgcaaattgtggtggcgacggtggcgttcggcatgggcatcaataaaccaaacgttcgcttcgtggtccactttgatattccgcgcaatatcgaatcctattatcaggaaaccggtcgcgccgggcgtgatggcctgcctgcggaagcgatgttgttttacgatccagctgatatggcgtggctgcgccgttgtctggaagagaagccgcaggggcagttgcaggatatcgagcgccacaaactcaatgcgatgggcgcgtttgccgaagcgcaaacttgccgtcgtctggtattgctgaactattttggcgaagggcgtcaggagccgtgcgggaactgcgatatctgcctcgatccgccgaaacagtacgacggttcaaccgatgctcagattgccctttccaccattggtcgtgtgaatcagcggtttgggatgggttatgtggtggaagtgattcgtggtgctaataaccagcgtatccgcgactatggtcatgacaaactgaaagtctatggcatgggccgtgataaaagccatgaacattgggtgagcgtgatccgccagctgattcacctcggcctggtgacgcaaaatattgcccagcattctgccctacaactgacagaggccgcgcgcccggtgctgcgcggcgaatcctctttacaacttgccgtgccgcgtatcgtggcgctcaaaccgaaagcgatgcagaaatcgttcggcggcaactatgatcgcaaactgttcgccaaattacgcaaactgcgtaaatcgattgccgatgaaagtaatgtcccgccgtacgtggtgtttaacgacgcaaccttgattgagatggctgaacagatgccgatcaccgccagcgaaatgctcagcgttaacggcgttgggatgcgcaagctggaacgctttggtaaaccgtttatggcgctgattcgtgcgcatgtcgatggcgacgacgaagagtagtcagcagcataaaaaagtgccaggatgaagactccgtaaacgtttcccccgcgagtcaaatgtatgttgatgttatttctcaccgtcgccatggtgcacattgtggcgcttatgagtcccggtcccgatttcttttttgtctctcagaccgctgtcagtcgttcccgtaaagaagcgatgatgggcgtgctgggtattacctgcggcgttatggtttgggcagggattgcgttgcttggcctgcatttgattatcgaaaaaatggcctggctgcatacgctgattatggttggcggtggcctgtatctctgctggatgggttaccagatgctgcgcggcgcgctgaaaaaagaggcggtttctgcacctgcgccacaggtcgagctggcgaaaagtgggcgcagtttcctgaaaggtttactgaccaatctcgctaatccgaaagcgattatctactttggctcggtgttctcattgtttgtcggtgataacgttggcactaccgcgcgctggggcattttcgcgttgattattgtcgaaacgctggcgtggtttactgtggtggccagcctgtttgccctgccgcaaatgcgccgtggttatcaacgtctggcgaagtggattgatggttttgccggggcgttatttgccggatttggcattcatttgattatttcgcggtaatgccagacgcgtcttcagagtaagtcggataaggcgtttacgccgcatccgacattatttttcacgcatgcntcgccgatgctaacagcgctcccaccagcataaacaacgagccgaaaatcttattcagcgccttcatctgctttggtcctttaatccatagagcaatccgttgagcaagggtggcgtaaccgatcatcacaataatatcgaccacaatagtggtgacaccgagcacgatatactgcatcagttgcggctgttgcggcatgatgaattgcggaaatagcgccgccagaaacacaatacttttgggattggtgagattcacaaaaactgcgcgctggaacaaatgtcgacgcgattgagtagaggccagcgatttaagatcaattgcgccagcggcgcgccattgctgtattcccagccaaatcaagtaagccgcgcctgcccacttcaacacttcaaacgcaatcactgagcgggaaaatagcgtccccaaccccacgccaaccagcacaatatgaatcgccagtccggtctgaagcccggcaatagacgccaccgcgccgcgataaccgtggttgagcgaggtggtcatagtgttgattgcaccagagcctggcgacaggcttaaaatgattgatgtcagtaggtaggcaaaccaccattctaaggtcatgatgaactcccggtgtgtctatttttgtgccacaatacgctactgtcgcagcgttgtgtcaggcacgctaaaaaaaacgattttacgtggtttaagaggcagattacccgatgtttcagcagcaaaaagactgggaaacaagagaaaacgcgtttgctgcttttaccatgggaccgctgactgatttctggcgtcagcgtgatgaagcagagtttactggtgtggatgacattccggtgcgctttgtccgttttcgcgcacagcaccatgaccgggtggtagtcatctgcccggggcgtattgagagctacgtaaaatatgcggaactggcctacgatttgttccatttggggtttgatgtcttaatcatcgaccatcgcgggcagggacgttccggtcgcctgttagccgatccgcatctcgggcatgttaatcgctttaatgattatgttgatgatctggcggcattctggcaacaggaggtccagcccggtccgtggcgtaaacgctatatactggcacattcgatgggcggtgcgatctccacattatttctgcaacgccatccaggtgtatgtgacgccattgcgctaactgcgccaatgtttgggatcgtgattcgtatgccgtcatttatggcacggcagatcctcaactgggccgaagcgcatccacgtttccgtgatggctatgcaataggcaccgggcgctggcgcgcgttgccgtttgctatcaacgtactgacccacagcagacagcgatatcgacgtaacttacgcttctatgctgatgacccaacgattcgcgtcggtgggccgacctaccattgggtacgcgaaagtattctggctggcgaacaggtgttagccggtgcgggtgatgacgccacgccaacgcttctcttgcaggctgaagaggaacgcgtggtggataaccgcattcatgaccgtttttgtgaactccgcaccgccgcgggccatcctgtcgaagggggacgaccgctggtaattaaaggtgcgtaccatgagatcctttttgaaaaggacgcaatgcgctcagttgcgctccacgccatcgttgattttttcaacaggcataactcacccagcggaaaccgctctacagaggtttaaatttcttatgtaccaggttgttgcgtctgatttagatggcacgttactttctcccgaccatacattatccccttacgccaaagaaaccctgaagctgctcaccgcgcgcggcatcaactttgtgtttgcgaccggtcgtcaccacgttgatgtggggcaaattcgcgataatctggagattaagtcttacatgattacctccaatggtgcgcgcgttcacgatctggatggtaatctgatttttgctcataacctggatcgcgacattgccagcgatctgtttggcgtagtcaacgacaatccggacatcattactaacgtttatcgcgacgacgaatggtttatgaatcgccatcgcccggaagagatgcgcttttttaaagaagcggtgttcaaatatgcgctgtatgagcctggattactggagccggaaggcgtcagcaaagtgttcttcacctgcgattcccatgaacaactgctgccgctggagcaggcgattaacgctcgttggggcgatcgcgtcaacgtcagtttctctaccttaacctgtctggaagtgatggcgggcggcgtttcaaaaggccatgcgctggaagcggtggcgaagaaactgggctacagcctgaaggattgtattgcgtttggtgacgggatgaacgatgccgaaatgctgtcgatggcggggaaaggctgcattatgggcagtgcgcaccagcgtctgaaagaccttcatcccgagctggaagtgattggtactaatgccgacgacgcggtgccgcattatctgcgtaaactctatttatcgtaatcgttctttatttggtcagttgtcaacctgatacttcgctacaatggatactcgttaatcaaagagttttccattgtggcgctacttatcatcaccacgattctgtgggccttctcctttagcttttatggcgagtaccttgcggggcacgtcgatagctattttgcggtgctggtgcgcgttggcctggcggcactcgtttttctgccgtttctgcgtacccgtggcaatagcctgaaaacagtcggcctgtatatgctggtgggcgcgatgcagctcggcgtgatgtatatgctgagtttccgcgcttatctctacctgacggtttccgaactgctgctgttcaccgtactgacgccgctctacatcacgctgatttatgacatcatgagtaagcgccgtctgcgctggggatatgcttttagtgccttgttggcggtgattggtgccgggattattcgctatgatcaggtcaccgaccatttctggactggcttgttgctggtgcaactctccaatatcacttttgccatcggcatggtgggttacaaacgcctgatggaaactcgcccgatgccgcagcataacgcctttgcgtggttctatcttggcgcgttcctggtggcggtaattgcatggttcttgctgggaaatgcgcagaaaatgccgcaaaccacgttgcaatggggcattctggtgtttcttggcgtggtggcttccgggattggctactttatgtggaactacggcgcaacccaagtagacgccggaacgctgggcattatgaataatatgcacgttccggcagggctgctggttaacctggctatctggcaccaacagccgcactggccaacgtttattacaggcgcgctggtgatcctggcctcactgtgggtgcatcgtaagtgggtcgctccgcgctcttcacaaacggcagatgatcgcaggcgtgattgcgcgctgagcgaataaacgcttccgtaactggctgacgctgctcgccatcgcgcacggcggcgtacagtcggctccacaagccttcgcccagggttttggtcaccaccagaccctggcgctcaaaactctctactacccaatgtggtagcgcggcaatacccatccgcgcggcaaccatctgaatcaacaataaggtgttatcgacgcttttcagcgacgggctaacgcctgcgggctggagaaaatgccgccagacatccagtcggctacgctgcaccggataaatcaacagcgtttcgctggcgagatcttccggcgtgattcgcgttttcgccgccagtggatggtcaggtgctaacaccagacgcacttcatagtcgaacatcggcgaataatgcaggccactacgcggcagaatatcggaggtcatcaccagatccagctcgccctgctgcaacgcaggctgcgggtcaaacgttacgcccgatttaaaatccatctccacctgcggccagttcttatggaaattttctaatgcgggcgtcagccactgaatacagctatggcactcaatggcaatgcgcaggcgcgtctgttgcggttcattgcaggcttgcagcgcctggctaatttgcggcagcacctggtttgccagttgcaacaggatttccccctgtggagtaaagcgtagcggctggctcttacgcacaaatagccggaagccaaggcgttgttccagatcgctaaactggtgagacagggcggattgcgtttgatgcaacgtcgccgcagcggctgcgagagagccgcagttccgcaacgcttgtagcgttttcaggtgttttacttcgatcatgaaagtccttcacttcggcatgaatnatttgcgcttgaggaatatacagtaaccgccaattatggatgtgtaaanatctggacggctaaaatccttcgtcttttaaatttatggtgcgttggctgcgtttctccacnccggtcacttacttcagtaagctcccggggatgaataaacttgccgccttccctaaattcaaaatccataggatttacatataattagaggaagaaaaatgacaatattgaatcacaccctcggtttccctcgcgttggcctgcgtcgcgagctgaaaaaagcgcaagagagttattgggcggggaactccacgcgtgaagaactgctggcggtagggcgtgaattgcgtgctcgtcactgggatcaacaaaagcaagcgggtatcgacctgctgccggtgggcgattttgcctggtacgatcatgtactgaccaccagtctgctgctgggtaacgttccggcgcgtcatcagaacaaagatggttcggtagatatcgacaccctgttccgtattggtcgtggacgtgcgccgactggcgaacctgcggcggcagcggaaatgaccaaatggtttaacaccaactatcactacatggtgccggagttcgttaaaggccaacagttcaaactgacctggacgcagctgctggacgaagtggacgaggcgctggcgctgggccacaaggtgaaacctgtgctgctggggccgattacctggctgtggctggggaaagtgaaaggtgaacagtttgaccgcctgagcctgctgaacgacattctgccggtttatcagcaagtgctggcagaactggcgaaacgcggcatcgagtgggtacagattgatgaacccgcgctggtactggaactaccacaggcgtggctggacgcatacaaacccgcttacgacgcgctccagggacaggtgaaactgctgctgaccacctattttgaaggcgtaacgccaaatctcgacacgattactgcgctgcctgttcaggggctgcatgtggaccttgtacatggtaaagatgacgttgttgaactgcacaagcgcctgccttctgactggctgctgtctgcgggtctgatcaatggtcgtaacgtctggcgcgccgatcttactgagaaatatgtgcaaattaaggacattgtcggcaaacgtgatttgtgggtggcatcttcctgctcgttgctgcacagccccatcgacctgagcgtggaaacgcgtcttgatgcagaagtgaaaagctggtttgccttcgccctacaaaaatgccatgaactggcactgctgcgcgatgcgctgaacagtggtgacacggcagctctggcagagtggagcgccccaattcaggcgcgtcgtcactctactcgtgtacataatccggcggtagaaaagcgtctggcggcgatcaccgcccaggacagccagcgtgcgaatgtntatgaagtgcgtgctgaagcccagcgtgcgcgttttaaactgccagcgtggccgaccaccacgattggttccttcccgcaaaccacggaaattcgtaccctgcgtctggatttcaaaaagggcaatctcgacgccaataactaccgcacgggcattgcggaacatatcaggcaggccattgttgaacaggaacgtttgggactggatgtgctggtacatggcgaggccgagcgtaatgacatggtggaatactttggcgagcacctcgacgggtttgtctttacgcaaaacggttgggtacagagctacggttcccgctgcgtgaagccaccgattgttattggtgacgttagtcgcccggcaccgattaccgtggagtgggcgaagtatgcgcaatctctgactgataaaccggtgaaagggatgctgactggcccggtgaccattctctgctggtcgttcccgcgtgaagatgtcagccgtgaaaccatcgccaaacaaattgcgctggcgctgcgtgatgaagtggcggacctggaagccgcaggaattggcatcatccagattgatgaaccggcgctgcgcgaaggtttaccgctgcgtcgtagcgactgggatgcatatctccagtggggcgtggaggccttccgtatcaacgccgccgtggcgaaagatgacacacaaatccacactcacatgtgttattgcgagttcaacgacatcatggattcgattgcggcactggacgcagacgtcatcaccatcgaaacctcgcgttctgacatggagttgctggagtcgttcgaagagtttgattatccgaatgaaatcggtccaggcgtctatgacattcactcgccaaacgtaccgagcgtggaatggattgaagccttgctgaagaaagcggcaaaacgcattccggcagagcgcctgtgggtcaacccggactgtggcctgaaaacgcgcggctggccagaaacccgcgcggcactggcgaacatggtgcaggcggcgcagaacttgcgtcgggggtaaaatccaaaccgggtggtaataccacccggtcttttctcattacagcgacttcttcccaccatactgcttaaaccattccagcatacgctgccagccatcttctgcagatgcggcatgatagctcgggcgataatcagcgttgaatgcatgcccggcgtccgggtacacgataatctctgctttcgcattagcagcccgcagcgcctggcgcatggtttcaacgctctcctgcggaatactgttatccagaccgccatataagccgagaaccggcgcgttaagatcggttgcgatatcaacaggttgtttcggtgaattcagcgacttatcgcccgtcagtttgccgtaccacgccactgcggcttttagctgtggattatgcgcggcatacagccaagtgatacgtccaccccagcagaatccggtgatcattaaacgatgaacatcgccgccgttgcgggaagcccaactggcgacatgatcgagatcggccagcacctgcgagtcaggcacttttgctaccagaccgctaagcaacgtggggatatcggcaaaatcattcggatcgccttcgcggaagtaaagttcaggtgcgatagccagatacccctccagcgccagacggcgacaaatgtcgcggatatgttcatgcacgccaaaaatttcctgcactacaatgaccactggcagtgggccatcgctttgctttggtctggcatggtaagcaggcatgttatccccttgtgaagggatagaggtgaagcccgccacaatcgcgtcgtccggggtctgaacgatggtcgaagcgagaggcgatgcagcaggtgcaaatccagattgttgtgttgttgccatggtattctccgtacccttataaaaatgttgcgcaatgttaactatagtcagcatgcaacaaatcacattgcctgaatcggctcatcttttatgcagtcctgcagaatgaagagtgatttatgtgatttgcatcacctttggtgggtaaatttatgcaacgcatttgcgtcatggtgatgagtatcacgaaaaaatgttaaacccttcggtaaagtgtctttttgcttcttctgactaaaccgattcacagaggagttgtatatgtccaagtctgatgtttttcatctcggcctcactaaaaacgatttacaaggggctacgcttgccatcgtccctggcgacccggatcgtgtggaaaagatcgccgcgctgatggataagccggttaagctggcatctcaccgcgaattcactacctggcgtgcagagctggatggtaaacctgttatcgtctgctctaccggtatcggcggcccgtctacctctattgctgttgaagagctggcacagctgggcattcgcaccttcctgcgtatcggtacaacgggcgctattcagccgcatattaatgtgggtgatgtcctggttaccacggcgtctgtccgtctggatggcgcgagcctgcacttcgcaccgctggaattcccggctgtcgctgatttcgaatgtacgactgcgctggttgaagctgcgaaatccattggcgcgacaactcacgttggcgtgacagcttcttctgataccttctacccaggtcaggaacgttacgatacttactctggtcgcgtagttcgtcactttaaaggttctatggaagagtggcaggcgatgggcgtaatgaactatgaaatggaatctgcaaccctgctgaccatgtgtgcaagtcagggcctgcgtgccggtatggtagcgggtgttatcgttaaccgcacccagcaagagatcccgaatgctgagacgatgaaacaaactgaaagccaagcggtgaaaatcgtggtggaagcggcgcgtcgtctgctgtaattctcttctcctgtctgaaggccgacgcgttcggccttttgtatttttgcgtagcgcctcgcaggaaatgcctttccaactggacgtttgtacagcacaattctattttgtgcgggtaagttgttgcgtcaggaggcgttgtggatttctcaatcatggtttacgcagttattgcgttggtgggtgtggcaattggctggctgtttgccagttatcaacatgcgcagcaaaaagccgagcaattagctgaacgtgaagagatggtcgcggagttaagcgcggcaaaacaacaaattacccaaagcgagcactggcgtgcagagtgcgagttactcaataacgaagtgcgcagcctgcaaagtattaacacctctctggaggccgatctgcgtgaagtaaccacgcggatggaagccgcacagcaacatgctgacgataaaattcgccagatgattaacagcgagcagcgcctcagtgagcagtttgaaaacctcgccaaccgtatttttgagcacagcaatcgccgggttgatgagcaaaaccgtcagagtctgaacagcctgttgtcgccgctacgtgaacaactggacggtttccgccgtcaggttcaggacagcttcggtaaagaagcacaagaacgccataccctgacccacgaaattcgcaatctccagcaactcaacgcgcaaatggcccaggaagcgatcaacctgacgcnngcgctgaaaggcgacaataaaacccagggcaactggggcgaggtagtattgacgcgggtgctggaggcttccggtctgcgtgaagggtatgaatatgaaacccaggtcagcatcgaaaatgacgcccgntcgcggatgcagccggatgtcatcgtgcggctgccgcagggaaaagatgtggtgatcgacgccaaaatgacgctggtcgcctatgaacgctattttaacgccgaagacgactacacccgcgaaagcgcgctacaggaacatatcgcgtcggtgcgtaaccatatccgtttgctgggacgcaaagattatcaacagctgccggggctgcgaactctggattacgtgctgatgtttattcccgttgaacccgcttttttactggcgcttgaccgccagccggagctgatcaccgaagcgttgaaaaacaatatcatgctggttagcccgactacgctgctggtggcgctgcgcactatcgccaacctgtggcgttatgagcatcaaagccgcaacgcccagcaaatcgccgatcgtgccagcaagctgtacgacaagatgcgtttgttcatcgatgacatgtccgcgattggtcaaagtctcgacaaagcgcaggataactatcggcaggcaatgaaaaaactctcttcagggcgcggaaatgtgctggcgcaggcagaagcgtttcgcggtttaggagtagaaattaaacgcgagattaatccggatttggctgaacaggcggtgagccaggatgaagagtatcgacttcggtcggttccggagcagccgaatgatgaagcttatcaacgcgatgatgaatataatcagcagtcgcgctagcccattgggagtagttaagccgggtagaaatctagggcatcgacgcccaatctgttacacttctggaacaattttttgatgagcaggcattgagatggtggataagtcacaagaaacgacgcactttggttttcagaccgtcgcgaaggaacaaaaagcggatatggtcgcccacgttttccattccgtggcatcaaaatacgatgtcatgaatgatttgatgtcatttggtattcatcgtttgtggaagcgattcacgattgattgcagcggcgtacgccgtgggcagaccgtgctggatctggctggtggcaccggcgacctgacagcgaaattctcccgcctggtcggagaaactggcaaagtggtccttgctgatatcaatgaatccatgctcaaaatgggccgcgagaagctgcgtaatatcggtgtgattggcaacgttgagtatgttcaggcgaacgctgaggcgctgccgttcccggataacacctttgattgcatcaccatttcgtttggtctgcgtaacgtcaccgacaaagataaagcactgcgttcaatgtatcgcgtgctgaaacccggcggccgcctgctggtgcttgagttctcgaagccaattatcgagccgctgagcaaagcctatgatgcatactccttccatgtgctgccgcgtattggctcactggtcgcgaacgacgccgacagctaccgttatctggcagaatccatccgtatgcatcccgatcaggataccctgaaagccatgatgcaggatgccggattcgaaagtgtcgactactacaatctgacggcaggggttgtggcgctgcatcgtggttataagttctgacaggagaccggaaatgccttttaaacctttagtgacggcaggaattgaaagtctgctcaacaccttcctgtatcgctcacccgcgctgaaaacggcccgctcgcgtctgttgggcaaagtgctgcgcgtggaggtaaaaggcttttcgacgtcattgattctggtgttcagcgaacgccaggttgatgtactgggcgaatgggcaggcgatgctgactgcaccgttatcgcctacgccagtgtgttgccgaaacttcgcgatcgccagcagcttgccgccctgattcgcagtggtgagctggaagtgcagggcgatattcaggtggtgcaaaacttcgttgcgctggcaggtctggcagagttcgaccctgcggaactgctggccccttataccggtgatatcgccgctgaaggaatcagcaaagccatgcgcggaggcgcaaagttcctgcatcacggcattaagcgccagcaacgttatgtggcggaagccattactgaagagtggcgtatggcacccggtccgcttgaagtggcctggtttgcggaagagacggctgccgtcgagcgtgctgttgatgccctgatcaaacggctggaaaaactggaggctaaatgacgccaggtgaagtacggcgcctatatttcatcattcgcacttttttaagctacggacttgatgaactgatccccaaaatgcgtatcaccctgccgctacggctatggcgatactcattattctggatgccaaatcggcataaagacaaacttttaggtgagcgactacgactggccctgcaagaactggggccggtatggatcaagttcgggcaaatgttatcaacccgccgcgatctttttccgccgcatattgccgatcagctggcgttattgcaggacaaagttgctccgtttgatggcaagctggcgaagcagcagattgaagctgcaatgggcggcttgccggtagaagcgtggtttgacgattttgaaatcaagccactggcttctgcttctatcgcccaggttcataccgcgcgattgaaatcgaatggtaaagaggtggtgattaaagtcatccgcccggatattttgccggtcattaaagcagacctgaaacttatctaccgtctggctcgctgggtgccgcgtttgctgccggatggtcgccgtctacgcccaaccgaagtggtgcgcgagtacgaaaagaccttgattgatgaactgaatttgctgcgggaatctgccaacgccattcagcttcggcgaaattttgaagacagcccgatgctctacatcccggaggtttaccctgactattgtagtgaagggatgatggtgatggagcgtatttacggcattccggtgtctgatgttgcggcgctggagaaaaacggcaccaacatgaaattgctggcggaacgcggcgtgcaggtgttcttcactcaggtctttcgcgacagctttttccatgccgatatgcaccctggcaacatcttcgtaagctatgaacacccggaaaacccgaaatatatcggcattgattgcgggattgttggctcgctaaacaaagaagataaacgctatctggcagaaaactttattgccttctttaatcgcgactatcgcaaagtggcagagctacacgtcgattctggctgggtgccaccagataccaacgttgaagagttcgaatttgctattcgtacggtctgtgaacctatctttgagaaaccgctggccgaaatttcgtttggacatgtactgttaaatctgtttaatacggcgcgtcgcttcaatatggaagtgcagccgcaactggtgttactccagaaaaccctgctctacgtcgaaggggtaggacgccagctttatccgcaactcgatttatggaaaacggcgaagcctttcctggagtcgtggattaaagatcaggtcggtattcctgcgctggtgagagcatttaaagaaaaagcgccgttctgggtcgaaaaaatgccagaactgcctgaattggtttacgacagtttgcgccagggcaagtatttacagcacagtgttgataagattgcccgcgagcttcagtcaaatcatgtacgtcagggacaatcgcgttattttctcggaattggcgctacgttagtattaagtggcacattcttgttggtcagccgacctgaatgggggctgatgcccggctggttaatggcaggtggtctgatcgcctggtttgtcggttggcgcaaaacacgctgattttttcatcgctcaaggcgggccgtgtaacgtataatgcggctttgtttaatcatcatctaccacagangaacatgtatgggtggtatcagtatttggcagttattgattattgccgtcatcgttgtactgctttttggcaccaaaaagctcggctccatcggttccgatcttggtgcgtcgatcaaaggctttaaaaaagcaatgagcgatgatgaaccaaagcaggataaaaccagtcaggatgctgattttactgcgaaaactatcgccgataagcaggcggatacgaatcaggaacaggctaaaacagaagacgcgaagcgccacgataaagagcaggtgtaatccgtgtttgatatcggttttagcgaactgctattggtgttcatcatcggcctcgtcgttctggggccgcaacgactgcctgtggcggtaaaaacggtagcgggctggattcgcgcgttgcgttcactggcgacaacggtgcagaacgaactgacccaggagttaaaactccaggagtttcaggacagtctgaaaaaggttgaaaaggcgagcctcactaacctgacgcccgaactgaaagcgtcgatggatgaactacgccaggccgcggagtcgatgaagcgttcctacgttgcaaacgatcctgaaaaggcgagcgatgaagcgcacaccatccataacccggtggtgaaagataatgaagctgcgcatgagggcgtaacgcctgccgctgcacaaacgcaggccagttcgccggaacagaagccagaaaccacgccagagccggtggtaaaacctgctgcggacgctgaaccgaaaaccgctgcaccttccccttcgtcgagtgataaaccgtaaacatgtctgtagaagatactcaaccgcttatcacgcatctgattgagctgcgtaagcgtctgctgaactgcattatcgcggtgatcgtgatattcctgtgtctggtctatttcgccaatgacatctatcacctggtatccgcgccattgatcaagcagttgccgcaaggttcaacgatgatcgccaccgacgtggcctcgccgttctttacgccgatcaagctgacctttatggtgtcgctgattctgtcagcgccggtgattctctatcaggtgtgggcatttatcgccccagcgctgtataagcatgaacgtcgcctggtggcnccgctgctggtttccagctctctgctattttatatcggcatggcgttcgcctactttgtggtctttccgctggcatttggcttccttgccaataccgcgccggaaggggtgcaggtatccaccgacatcgccagctatttaagcttcgttatggcgctgtttatggcgtttggtgtctcctttgaagtgccggtggcaattgtgctgctgtgctggatggggattacctcgccagaagacttacgcaaaaaacgcccgtatgtgctggttggtgcattcgttgtcgggatgttgctgacgccgccggatgtcttctcgcaaacgctgttggcgatcccgatgtactgtctgtttgaaatcggtgtcttcttctcacgcttttacgttggtaaagggcgaaatcgggaagaggaaaacgacgctgaagcagaaagcgaaaaaactgaagaataaattcaaccgcccgtcagggcggttgtcatatggagtacaggatgtttgatatcggcgttaatttgaccagttcgcaatttgcgaaagaccgtgatgatgttgtagcgcgcgctnttgacgcgggagttaatgggctactcatcaccggcactaacctgcgtgaaagccagcaggcgcaaaagctggcgcgtcagtattcgtcctgttggtcaacggcgggcgtacatcctcacgacagcagccagtggcaagctgcgactgaagaagcgattattgagctggccgcgcagccagaagtggtggcgattggtgaatgtggtctcgactttaaccgcaacttttcgacgccggaagagcaggaacgcgcttttgttgcccagctacgcattgccgcagatttaaacatgccggtatttatgcactgtcgcgatgcccacgagcggtttatgacattactggagccgtggctggataaactgcctggtgcggttcttcattgctttaccggcacacgcgaagagatgcaggcgtgcgtggcgcatggaatttatatcggcattaccggttgggtttgcgatgaacgacgcggactggagctgcgggaacttttgccgttgattccggcggaaaaattactgatcgaaactgatgcgccgtatctgctccctcgcgatctcacgccaaagccatcatcccggcgcaacgagccagcccatctgccccatattttgcaacgtattgcgcactggcgtggagaagatgccgcatggctggctgccaccacggatgctaatgtcaaaacactgtttgggattgcgttttagagtttgcggaactcggtgttcttcacactgtgcttaatctctttattaataagattaagcaatagcatggagcgagcctcaccatcgggttcggtgaaaatggcctgaaagccttcgaacgcgccttcggtaataatcaccttatcacccggataaggggttgccggatcgacaatgtctttcggtttatataccgatagctgatgaatcaccgccgatgggactatcgctggcgacgcgcnnnagcgcacgaagtggctgacaccgcgggtcgcgttgatagtcgtggtatgaatcacttctggatcaaattccacaaacaggtagttggggaacaatggctcactgactgcagtacgtttgccacgcacgattttttccagggtgatcatcggtgccaggcaattcacagcctgtctttcgaggtgttcctgggcacgttgaagttgcccgcgcttgcagtacagtaaataccaggattgcataatgactcttatccgtttaatcggggcgcaaggatagcaaaagctttacgctaagttaattatattccccggtttgcgttataccgtcagagttcacgctaatttaacaaatttacagcatcgcaaagatgaacgccgtataatgggcgcagattaagaggctacaatggacgccatgaaatataacgatttacgcgacttcttgacgttgcttgaacagcagggtgagctaaaacgtatcacgctcccggtggacccgcatctggaaatcactgaaattgctgaccgcacgctgcgtgctggtgggcctgcgctgttgtttgaaaaccctaaagggtactcaatgccggtgctgtgcaacttgttcggtacgccaaagcgcgtagcgatgggtatgggccaggaagatgtttcagcactgcgtgaagtcggtaaattattagcatttctgaaagaaccagagccgccaaaaggttttcgcgatctgtttgataagctgccgcagtttaagcaggtgttaaacatgccgacaaagcgactgcgcggtgcaccctgccaacaaaaaatcgtctctggcgatgacgtcgatctcaaccgtattcccattatgacctgttggccggaagatgccgcgccgctgattacatgggggctaaccgttacacgtggccctcataaagagcgacagaatctgggcatttatcgccagcaactgattggtaaaaacaagctgattatgcgttggctgtcgcatcgcnnnnncgcgctggattatcaggagtggtgtgcggcgcatccaggtgaacgtttcccgatctctgtggcgttgggcgctgatccggcaaccattctcggtgcagtcacaccagtaccagatactttgtcggaatacgcctttgccggattgctacgtggcaccaaaaccgaagtagtgaagtgtatttccaatgatctcgaagtgcccgccagtgcggagattgtgctggaagggtatatcgaacaaggcgaaatggcgccagaaggaccgtatggtgaccacactggttactataacgaagtcgatagtttcccggtatttaccgtgacgcatattacccagcgtgaagatgcgatttaccattccacctataccgggcgtccgccagatgaacccgcggtactgggagtggcgttgaacgaagtatttgttcccattctgcaaaagcagttcccggaaattgtcgatttttacctgccgccggaaggctgctcttatcgcctggcggtagtgacaatcaaaaaacagtacgccggacacgcgaagcgcgtcatgatgggcgtctggtcgttcttacgccagtttatgtacactaaatttgtgatcgtttgcgatgatgacgttaacgcacgcgactggaacgatgtgatttgggcgattaccacccgtatggacccagcgcgggatactgttctggtagaaaatacgcctattgattatctggattttgcctcgcctgtctccgggctgggttcaaaaatggggctggatgccacgaanaaatggccgggggaaacccagcgtgaatggggacgtcccatcaaaaaagatccagatgttgtcgcacatattgacgccatctgggatgaactggctatttttaacaacggtaaaagcgcctgatgcgcgtttgttttgccctatttatcgatccgacagagaaagcgcatgacaaccttaagctgtaaagtgacctcggtagaagctatcacggataccgtatatcgtgtccgcatcgtgccagacgcggccttttcttttcgtgctggtcagtatttgatggtagtgatggatgagcgcgacaaacgtccgttctcaatggcctcgacgccggatgaaaaagggtttatcgagctgcatattggcgcttctgaaatcaacctttacgcgaaagcagtcatggaccgcatcctcaaagatcatcaaatcgtggtcgatattccccacggagaagcgtggctgcgcgatgatgaagagcgtccgatgattttgattgcgggcggcaccgggttctcttatgcccgctcgattttgctgacagcgttggcgcgtaacccaaaccgtgatatcaccatttactggggcgggcgtgaagagcagcatctgtatgatctctgcgagcttgaggcgctttcgttgaagcatcctggtctgcaagtggtgccggtggttgaacaaccggaagcgggctggcgtgggcgtactggcaccgtgttaacggcggtattgcaggatcacggtacgctggcagagcatgatatctatattgccggacgttttgagatggcgaaaattgcccgtgacctgttttgcagtgagcgtaatgcgcgggaagatcgcctgtttggcgatgcgtttgcatttatctgagatataaaaaaacccgcccctgacaggcgggaagaacggcaactaaaactttattcagtggcatttagatctatgtcgcatccggcattcggcacacgatgcctgatgcgacgctggcgcgtcttatcaggcntacattggtgccggatcggtagaccggataaggcgttcacgccgcatccggcaagtggttaaacccgctcaaacaccgtcgcaataccctgacccagaccgatacacatcgtcgccagaccaaactgaacgtctttgtgttccatcagattcagcagcgtggtgctgatacgcgcaccggaacaacccagcggatgacccagcgcgatcgcgccaccgttgaggttgatcttctcgtcaatctgctcaattagtcccagatctttaatacatggcaggatctgcgcggcaaaggcttcattcatttcaaacacgccgatatcactgacagaaagccccgcttttttcagcgccagcttcgaggccggaaccgggccgtaacccatgatcgatgggtcacaaccaacgaccgccatcgaacgcacacgagcgcgcggcttaagacctaattcatgggcgcggctttcactcatcaccagcatggcagctgcgccatcggaaagtgcagaagatgtgcccgccgttaccgtaccgtttactggatcaaacgccggacgcagcgtggcgagggcttccacggtggtttccgggcgaatcacttcgtcgtaattaaactgcttcaggacgccgtcggcatcgtgaccaccagttgggatgatttcatttttaaatgcgcccgactgcgtggcggcccaggcgcgggcgtgtgaccgcgcggcaaaggcatcctgcatttcacggctgataccgtgcatacgcgccagcatttctgccgttaagcccatcatgcccgccgctttggcgacattgcggctcaggccagggtgaaaatcgacgccgtgactcatcggcacatggcccatatgctccacgccgccaaccagacatgcctgcgcatcgccggtcatgatcattcgtgctgcgtcatgcagtgcctgcatggatgaaccacacaagcgattgacagtaaccgccgggacagagtgcggcacttctgccagcagcgccgcgttacgggcgatattaaaaccctgctccagcgtctgctgcacacaaccccagtaaatatcgtcgagggccgccgcttccnnnnccgggttacgcgccagcaggctacgcattaaatgagcggagagatcttctgcacgcacgttacgaaaagcaccgcccttcgaacggcccatcggggtgcgaattgcatcgacaatgacaacctgttccattgtgactccttaagccgttttcaggtcgccaaccggacgggctggctcaaccgggggatagtacggttcgttatgacgcgctttattacgcagaccttccggcacttcgtacagcgggccgaggtgctgatattgctgtgccatatcgaggtattttgcgctgccgagggtgtccagccagcggaacgcgccgccgtggaacggagggaagcccaggccgtagaccagcgccatatccgcttctgccggagtggcgataatgccttcttccagacagcgcaccacttcgttgaccatcgggatcatcatgcgggcgataatctcttcttcgctgaaatcgcgcttcggctggctcacttctgccagcaggtcgtcaacagcggcgtcttcttctttcttcggctnacctttgctgtcttctttataatgccagaaaccgaggccgttcttctgaccaaagcggttggcatcaaacagcgcgtcgatggcatcgcgataatctttctgcatccgctgtgggaagcccgctgccatgactgcctgggcgtgatgcgcggtgtcaatgcccacaacgtccagcagatatgccggacccataggccagccaaactgtttttccatcactttgtcgatcttgcggaaatccgcgccgtcgcgcagcaactggctgaaaccggcgaaatacgggaacagcacgcggttgacgaagaagccggggcaatcgttaaccacaatcggcgttttacccatcttgctcgcccaggcgacgactttcgcaatagtttcgtcggagcttttctcgccgcgaataatttccaccaacggcattcggtggaccgggttaaagaagtgcatcccgcagaagttttccggacgttccagcgcgttggccagttcgctgataggaatggttgaagtgttagacgccagcacggtatccgggcgtactttctgctcggtttctgccagcacggcttttttcactttcgggttttcaacaatcgcttctaccacaacatccacgcgctcaaatccggcgtagtcgagcgttgggtggatcgtggagatcacgccagccagtttcagaccatcgatcttgccgcgctcaagctgcttgttcagtagtttcgcggcttcagtcatgccgagggctaacgacttgtcgttaatatctttcataatcaccggcacgcctttccacgcagactggtaagcgatgccgccacccataatgcctgcgcccagcacggcggcctgtttcggggtttcaacgtctttggtgagtttcttcgctttgccttttacatattgatcgttaaggaaaatgccgaccagtgcgcgagcttcgttggtatgcgccagcgggacaaagcttttgttttctaggtttaaggcttcttcacgaccaaaacgagccgcagcttcaatggtttttactgcggtgatgggggccgggtaatgttttcctgccgtttgtgcgaccatccctttagcgatggtgaagctcatggtggcttcaatcttgctcagttttagcggttccagcttcggctgacgtttcgctttccagtcgaggtcgccgttaatggcctggcgtaaaatcgccatcgccccttcaatcagtttttctgctttgactacgccatccaccagaccgattttcagcgcctgatccgcgccgacatctttaccggcggcaatgatttccagcgcactgtcagcgcccagcatacgtggcatacgtacagaaccgccaaagcccggcatgatgcccagtttggtttccggcagaccgatgcgcagatccggcgtcgccagacggtaatcggtcgccagcacgcattcgcagccaccgcccagcgcatagccattgacggcagcaatggtcggcaccggcagatcttccaggcgattaaacacgctattggcaaagtgcagccactgacttaactgttcttcaggaacgaggaacagggacaaaaattcggtgatatcagcaccgacgataaaggctgctttgttcgaacgcagcagcagcccttttagatctgattgctgttccagcacgccgatggcctcgccgaggctggcgacggtcgcagtgtcgagtttattaactgaacctggggcatcaaataccagttcggcaatgccatcttccagccagtcaaggtacagggtgtcgcctttgtaaagcatgtcagtctcctgaatccgcaaggtgatctggtcgtaccanatgcatcgaagtgtgtattttgtgttaaaaatatgcaaataaaagattaaagaaatgccgatctgatcacgctcggcagaaatcacgctctggatgaacgatgtgctaagatgcggagacttaaggtcaaaaaaacagaagggtaaaaaatggaatcactggcctcgctctataaaaatcatatagctacattgcaggaacgaactcgcgatgcnctgacgcgcttcaagctggatgcgttacttattcactccggcgaactgttcaacgtttttctcgacgatcatccctatccgtttaaagtgaacccgcaattcaaagcgtgggtgccggtaactcaggtgccaaactgctggctgctggtggatggcgtgaataagccgaaactgtggttctatctgccggttgattactggcacaacgtcgaaccgctgccgacctccttctggactgaagatgtagaagtgatcgcgctgccgaaagccgatggcattggtagtctgttgcctgctgcgcgcggcaatatcggttatatcggtccggtgccggaacgtgcgctgcaactgggtattgaggccagcaatatcaacccgaaaggggttatcgactacctgcattactaccgctccttcaaaaccgagtacgagctggcctgtatgcgtgaagcgcagaaaatggcggtcaacggtcatcgcgcggcagaagaagcgttccgttctggcatgagcgagttcgatatcaatattgcctatctgactgcgaccggtcatcgtgataccgacgtaccttacagcaacattgtggcactcaacgaacacgctgcggtgctgcattacaccaaactggatcatcaggcgccggaagagatgcgcagcttcctgctggatgccggggccgaatataacggctatgccgctgacctgacccgtacctggtcggcaaaaagtgacaacgattacgcacagctggtgaaagacgtaaatgatgaacaactggcgctgatcgcgaccatgaaagctggcgttagctatgtggattaccacatccagttccatcagcgcatcgccaaattgctgcgtaaacatcaaatcatcaccgatatgagtgaagaggcgatggtcgaaaacgatcttaccgggccgtttatgccgcatggtatcggccatccgctgggcctgcaggtgcatgacgtcgccggttttatgcaggatgatagcggtacgcacctcgcggcaccggcaaaatatccgtacctgcgctgcacccgtattctccagccgggcatggtgttaaccatcgaaccgggtatctacttcattgaatcgctgctggcaccgtggcgtgaagggcagttcagcaagcacttcaactggcagaaaattgaagcactgaaaccgttcggcggcattcgtatcgaagacaacgtggtgatccacgaaaataacgtggaaaacatgacccgggatctgaaactggcgtgatggaaagctggttaattcccgcggcaccggtcacggtcgttgaagagatcaaaaaaagccgcttcattacgctgttggcgcataccgatggcgttgaggcggcgaaagcgtttgttgaatcggtgcgggcagaacaccccgatgcccgccaccattgcgtggcgtgggtggcgggtgcgccggatgattctcaacagctgggtttctctgacgacggggagccggcgggaacggcaggtaaaccgatgctcgcccagctaatgggcagcggcgttggggaaattaccgctgtggtggtgcgctactacggcggcatattgcttggcaccggtgggttagtgaaagcgtatggcggcggcgtgaatcaggcgctgcgccagctaacgacccaacgcaagacgccattaaccgaatatactttgcaatgtgaatatagtcagttaaccggcattgaagcgttgctggggcagtgtgacggcaaaattatcaacagtgattatcaggcattcgttctgctgcgggtggcgcttccggcggcgaaagtggctgaattttccgcgaagctggcggattttagccgtggttcattgcaattgttagcgattgaagaataatccccacttcgttttgcagaactaaggaagcggcagagatgcattttcgcgccattacccgaatcgttggactactggtcatcttattttcagggaccatgattatccctgggctggtagcactcatctaccgggatggagcgggccgcgcttttacccagaccttttttgtcgccctcgccattggctctatgctgtggtggccgaaccgcaaagagaagggcgaactgaaatcccgtgaggggtttctgatagtggtgctgttctggaccgtgctgggtagtgtcggtgcgctcccttttatcttctcggaaagcccgaacctcacgattaccgatgcgttttttgaatctttctctggcctgaccaccaccggggccactacgctggtggggctggattcgctccctcatgccatcctcttttatcgccagatgctgcaatggtttggcgggatggggatcatcgtgttagcggttgcgatactgcctatcctcggcgtgggtgggatgcagctctatcgcgcagaaatgcccggcccgctgaaagataacaaaatgcgcccgcgaattgcggaaacggcgaaaaccctgtggttgatttatgtcttgctgaccgtcgcctgtgcgctggcgttgtggtttgccggaatggatgcctttgatgccatcggccatagctttgcgactatcgctattggcggcttctcgacacatgatgcaagtatcggttatttcgatagcccgactattaacactatcattgctatcttcctgctgatctccggctgtaactacggtctgcacttttcactgttaagtgggcgtagtctgaaggtttattggcgcgatccggaatttcgcatgtttatcggcgtacagtttacgctggtggttatttgtaccctcgtactgtggtttcataatgtctacagttcggcgctgatgacaattaaccaggcgtttttccaggtggtgtcgatggcgacaaccgccgggtttacgactgacagcattgcccgctggccgctctttttgccggtactgcttttatgttcagcttttatcggcggttgtgccgggtcaacgggcggtggcctgaaagtgatccgcatcctgctgctgtttaagcaggggaaccgtgaactgaaacgactggtgcatccgaacgccgtctatagcattaagctggggaatcgcgcactgccggaacgtatcctcgaagccgtttggggatttttctccgcctatgcattggtgtttattgtcagtatgctggcgattatcgccacgggcgtggatgacttttctgcctttgcctcggttgttgcgacattgaataacctggggccagggcttggcgtggttgctgataactttaccagtatgaacccggtggctaaatggatcctgattgccaacatgctgtttggtcgtctcgaggtctttacattgctggtgctctttaccccgactttctggcgtgaatgatggagtaatacgtgaaaacattaattcttttctcaacaagggacggacaaacgcgcgagattgcctcctacttggcttcggaactgaaagaactggggatccaggcggatgtcgccaatgtgcaccgcattgaagaaccacagtgggaaaactacgaccgtgtggtcattggtgcttctattcgctatggtcactaccactctgcgttccaggaatttgtcaaaaagcatgcgacgcggctgaattcgatgccgagcgcgttttactccgtaaacctggtggcgcgtaaaccggagaagcgcactccacagaccaacagctacgcgcggaagtttctgatgaactcgcaatggcgtcccgatcgctgcgcggtcattgccggggcgctgcgttacccacgttatcgctggtacgaccgttttatgatcaagctgattatgaagatgtcaggcggtgaaacggatacgcgcaaagaagttgtctataccgattgggagcaggtggcgaatttcgcccgagaaatcgcccatttaaccgacaaaccgacgctgaaataagcataaagaataaaaaatgcgcggtcagaannnnattttaaatttcctcttgtcaggccggaataactccctataatgcgccaccactgacacggaacaacggcaaacacgccgccgggtcagcgggnttctcctgagaattccgncagagaaagcaaaaataaatgcttgactctgtagcgggaaagngnnnnnnnnnnnnnnnnnnnnnnnnnnnnnnnnnnnnnnnnnnnnnctgctctttaacaatttatcagacaatctgtgtgggcactcgaagatacggattcttaacgtcgcaagacgaaaaatgaataccaagtctcaagagtgaacacgtaattcattacgaagtttaattctttgagcatcaaacttttaaattgaagagtttgatcatggctcagattgaacgctggcggcaggcctaacacatgcaagtcgaacggtaacaggaagaagcttgcttctttgctgacgagtggcggacgggtgagtaatgtctgggaaactgcctgatggagngggataactactggaaacggtagctaataccgcataacgtcgcaagaccaaagagggggaccttcgggcctcttgccatcggatgtgcccagatgggattagctagtaggtggggtaacggctcacctaggcgacgatccctagctggtctgagaggatgaccagccacactggaactgagacacggtccagantcctacgggaggcagcagtggggaatattgcacaatgggcgcaagcctgatgcagccatgccgcgtgtatgaagaaggccttcgggttgtnnnnnncnntcagcggggaggaagggagtaaagttaatacctttgctcattgacgttacccgcagaagaagcaccggctaactccgtgccagcagccgcggtaatacggagggtgcaagcgttaatcggaattactgggcgtaaagcgcacgcaggcggtttgttaagtcagatgtgaaatccccgggctcaacctgggaactgcatctgatactggcaagcttgagtctcgtagaggggggtagaattccaggtgtagcggtgaaatgcgtagagatctggaggaataccggtggcgaaggcggccccntggacgaagactgacgctcaggtgcgaaagcgtggggagcaaacaggattagataccctggtagtccacgccgtaaacgatgtcgacttggaggttgtgcccttgaggcgtggcttccggagctaacgcgttaagtcgaccgcctggggagtacggccgcaaggttaaaactcaaatgaattgacgggggcccgcacaagcggtggagcatgtggtttaattcgatgcaacgcgaagaaccttacctggtcttgacatccacagaactttccagagatggattggtgccttcgggaactgtgagacaggtgctgcatggctgtcgtcagctcgtgttgtgaaatgttgggttaagtcccgcaacgagcgcaacccttatcctttgttgccagcggtccggccgggaactcaaaggagactgccagtgataaactggaggaaggtggggatgacgtnnnnnnntcatggcccttacgaccagggctacacacgtgctacaatggcgcatacaaagagaagcgacctcgcgagagcaagcggacctcataaagtgcgtcgtagtccggattggagtctgcaactcgactccatgaagtcggaatcgctagtaatcgtggatcagaatgccacggtgaatacgttcccgggccttgtacacaccgcccgtcacaccatgggagtgggttgcaaaagaagtaggtagcttaaccttcgggagggcgcttaccactttgtgattcatgactggggtgaagtcgtaacaaggtaaccgtaggggaacctgcggttggatcacctccttaccttaaagaagcgtactttgcagtgctcacacagattgtctgatgaaaatgagcagtaaaacctctacaggcttgtagctcaggtggttagagcgcacccctgataagggtgaggtcggtggttcaagtccactcaggcctaccaaannnnnncggcaaatttgaagaggttttaactacatgttatggggctatagctcagctgggagagcgcctgctttgcacgcaggaggtctgcggttcgatcccgcatagctccaccatctctgtagtgattaaataaaaaatacttcagagtgtacctgcaaaggttcactgcgaagttttgctctttaaaaatctggatcaagctgaaaattgaaacactgaacaacgaaagttgttcgtgagtctctcaannnnnnnnnnnnnnnnnnnnnnnnnnnnnaaacatcttcgggttgtgaggttaagcgactaagcgtacacggtggatgccctggcagtcagaggcgatgaaggacgtgctaatctgcgataagcgtcggtaaggtgatatgaaccnntataaccggcgatttccgaatgggganacccagtgtnnntcgacacactatcattaactgaatccataggttaatgaggcgaaccgggggaactgaaacatctaagtaccccgaggaaaagaaatcaaccgagattcccccagtagcggcgagcgaacggggaggagcccagagcctgaatcagtgtgtgtgttagtggaagcgtctggaannnnnnnnnnnnnnnnnnnnnnnnnnnnnnnnnaaaaatgcacatgctntgagctcgatgagtagggcgggacacgtggtatcctgtctgaatatgggggnaccatcctccaaggntaaatactcctgactgaccgatagtgaaccagtaccgtgagggaaaggcgaaaagaaccccggcgaggggagtgaaaaagaacctgaaaccgtgtacgtacnnnnnnnnnnnnnnnnnnnnnnnnnnnnngactgcgtaccttttgtataatgggtcagcgacttatattctgtagcaagnnnnaccnaataggggagccgaagggaaaccgagtcttaactgggcgttaagttgcagggtatagacccgaaacccggtgatctagccatgggcaggttgaaggttgggtaacactaactggaggaccgaaccgactaatgttgnnaaatnngcggatgacttgtggctgggggtgaaaggccaatcaaaccgggagatagctggttctccccgaaagctatttaggtagcgcctcgtgaattcatctccgggggtagagcactgtttcggcaagggggtcatcccgacttaccaacccgatgcaaactgcgaataccggagaatgttatcacgggagacacacggcgggtgctaacgtccgtcgtgaagagggaaacaacccagaccgccagctaaggtcccaaagtcatggttaagtgggaaacgatgtgggaaggcccagacagccaggatgttggcttagaagcagccatcatttaaagaaagcgtaatagctcactggtcgagtcggcctgcgcggaagatgtaacggggctaaaccatgcaccgaagctgcggcagcgacactgtgtgttgttgggtaggggagcgttctgtaagcctgtgaaggtgtgctgtgaggcatgctggaggtatcagaagtgcgaatgctgacataagtaacgataaagcgggtgaaaagcccgctcgccggaagaccaagggttcctgtccaacgttaatcggggcagggtgagtcgnnccctaaggcgaggccgaaaggcgtagtcgatgggaaacaggttaatattcctgtacttggtgttactgcgaaggggggacggagaaggctatgttggccgggcgacggttgtcccggtttaagcgtgtaggctggttttccaggcaaatccggaaaatcaaggctgaggcgtgatgacgaggcactacggtgctgaagcaacaaatgccctgcttccaggaaaagcctctaagcatcaggtaacatcaaatcgtaccccaaaccgacacaggtggtcaggtagagaataccaaggcgcttgagagaantcgggtgaaggaactaggcaaaatggtgccgtaacttcgggagaaggcacgctgatatgtaggtgaagtccctcgcggatggagctgaaatcagtcgaagataccagctggctgcaactgtttattaaaaacacagcactgtgcaaacacgaaagtggacgtatacggtgtgacgcctgcccggtgccggaaggttaattgatggggtcagcgcaagcgaagctcttgatcgaagccccggtaaacggcggccgtaactataacggtcctaaggtagcgaaattccttgtcgggtaagttccgacctgcacgaatggcgtaatgatggccaggctgtctccacccgagactcagtgaaattgaactcgctgtgaagatgcagtgtacccgcggcaagacggaaagaccccgtgaacctttactatagcttgacactgaacattgagccttgatgtgtaggataggtgggaggctttgaagtgtggacgccagtctgcatggagccgaccttgaaataccaccctttaatgtttgatgttctaacgtggacccgtgatccgggttgcggacagtgtctggtgggtagtttgactggggcggtctcctcctaaagagtaacggaggagcacgaaggttggctaatcctggtcggacatcaggaggttagtgcaatggcataagccagcttgactgcgagcgtgacggcgcgagcaggtgcgaaagcaggtcatagtgatccggtggttctgaatggaagggccatcgctcaacggataaaaggtactccggggataacaggctgataccgcccaagagttcatatcgacggcggtgtttggcacctcgatgtcggctcatcacatcctggggctgaagtaggtcccaagggtatggctgttcgnnnnttaaagtggtacgcgagctgggtttagaacgtcgtgagacagttcggtccctatctgccgtgggcgctggagnntcanngggggcnnntctagtacgagaggaccsggagtggacgcatcactggtgttcgggttgtcatgccaatggcactgcccggtagctaaatgcggaagagataagtgctgaaagcatctaagcacgaaacttgccccgagatgagttctcnngacccnntaagggtcctgaaggaacgttgaagacgacgacgttgataggccgggtgtgtaagcgcagcgatgcgttgagctaaccggtactaatgaaccgtgaggcttaaccttacaacgccgaaggtgttttggcggatgagagaagattttcggcctgatacagattaaatcagaacgcagaagcggtctgataaaacagaatttgcctggcggccgtagcgcggtggtcccacctgaccccatgccgaactcagaagtgaaacgccgtagcgccgatggtagtgtggggtctccccatgcgagagtagggaactgccaggcatcaaattaagcgaaaggccatcctgacggatggcctttttgcgttggtgcaaaaaaatgccggatgcgacgctggcgcgtctgctccagcctactcttgcttatccgtcctgattttgcatccactccaccacaaaatcagccagcccctcaacatcattaatatccagtaacgcgacatcaagattaagcggcacatcactggctacagcaataacatgcctgtctatcactaattcttcaggtcgatgtccggctccatcgcgaaacagcacaatctttgcgatctcttcatgcttaaacccttcgaccagaatcaaatccagctttgaggtatccattcgacttgcgagaaactgtagatccagctcttcttcgtctggtgtttccgtcatcaaggcccatcgttgctggctggcaacgatggttgtgccgcgccagccttgcgcagctcatagctatctttgcctggcttatcaacatccatatcatggtgcgtatgcttaatcagccctggacggatccctctggcgcataatgccgggatcagttttttcaaaagcgtagtttttccggtaccactccacgcggcaaaggcgagtaacggtatcatcgtttttcctgccatcgggcaagctcctctggcgtattcacgttaacaaatgcatctttatgatcgctgaaatcaaccgcatgaccgccagccagacgcataaatgccattacccggcgttctcctgcttgcagatattctagtaataaaggctcaatagcgcggtttaccagagcaatagtcgggtgatcgcgttcaccgtcatggacccacacgacaggcgcatctttgcgctgatgattaagccgggcggctaaatcatggggaatgtaaggcgtatcgcacggacaaaacaaaaaccactcaccagcttcctgctgcattactgaaagcatccctgccagagggcctgggtaatccgccagtgaatcttcaatcantttcagaccgcctgcctgatagatttcctgatgacgattagcattaaccacgacgtgagagagctgcgtcataagcgcgtcagcgacatgttgccacagcggtttgccatttaagtccagcaatcctttatctacgccgcccattcgtctggctttaccgcctgccagcacaacgcctgttatcgtcgtcatcagattcaccgatatcgcctcttttattgtgggattgaccctgctaacgtgtctgtctcaagagtaaggagcattactatgaaatgtaaacgtctgaatgaagttattgaactcctccagccagcctggcaaaaagagccagaccttaacctgttgcaatttttgcagaaactggcgaaagagtcaggttttgacggcgaactggcggatttgacggatgacattctgatctatcacctgaaaatgcgtgattccgcgaaagatgcggtgatcccgggtttgcagaaagattatgaagaagacttcaaaacggcgctgttacgcgctcgcggcgtaattaaagagtaaaagcttgtaagcggcgccaccaaaatcatcgtgaaatgatatccttcatcattcgtaatgttttccggatgatgggatgaacaacagcgcttttactttccagacactacacccggataccatcatggacgctctgtttgagcaagggatccgggtggattccggtcttaccccgcttaacagctatgaaaaccgtgtctatcaatttcaggacgaagatcgtcgacgttttgtcgtcaaattttatcgtcctgaacgttggacagccgatcaaatcctcgaagaacatcaatttgcgttgcagctggtaaatgatgaagttccggttgcagcacctgtggcttttaacggtcagactttattgaatcatcagggattttatttcgctgtttttccaagcgtcggtggtcgccagttcgaagctgataatatcgatcagatggaagcggttgggcgttatttagggcgtatgcaccagacggggcgcaaacagctttttatccatcgcccgaccatcggtctgaatgaatatctcattgagccacgcaagctgtttgaggacgctacactgataccttccgggttgaaagcggcattcctgaaagcgacagatgagctgatcgccgccgttacagcacactggcgggaagatttcaccgttctgcggctacatggagactgccacgccgggaatattctctggcgcgatggtccaatgtttgttgatctggatgatgcacgtaatggtccagctattcaggatttgtggatgttgctcaatggcgataaagccgagcagcggatgcaactggaaactattattgaagcttatgaagaatttagcgagttcgacaccgctgaaatcggactgattgaacctttacgcgccatgcgtttggtttattatcttgcctggctaatgcggcgttgggctgatcccgcgttcccgaaaaatttcccgtggttaaccggggaagattactggctacgacagacggcgacttttatagaacaggcaaaagttctacaagaaccccctttgcaattaacacctatgtattaatcggagagagtagatcatgaaaaagatttggctggcgctggctggtttagttttagcgtttagcgcatcggcggcgcagtatgaagatggtaaacagtacactaccctggaaaaaccggtagctggcgcgccgcaagtgctggagtttttctctttcttctgcccgcactgctatcagtttgaagaagttctgcatatttctgataatgtgaagaaaaaactgccggaaggcgtgaagatgactaaataccacgtcaacttcatgggtggtgacctgggcaaagatctgactcaggcatgggctgtggcgatggcgctgggcgtggaagacaaagtgactgttccgctgtttgaaggcgtacagaaaacccagaccattcgttcagcatctgatatccgcgatgtatttatcaacgcaggtattaaaggtgaagagtacgacgcggcgtggaacagcttcgtggtgaaatctctggtcgctcagcaggaaaaagctgcagctgacgtgcaattgcgtggtgttccggcgatgtttgttaacggtaaatatcagctgaatccgcagggtatggataccagcaatatggatgtttttgttcagcagtatgctgatacagtgaaatatctgtccgagaaaaaataattcaatgtaaattacataaagcccgtgaatattcacgggctttttnnnntatttaataaatataaatacattctgataatgcatcctgccgctggacattatttcagcataagtggatattcaaagttttgctgttttatcagggaatatttatatgatacgtaagtcagctacaggtgttattgttgcgttagccgtaatctggggtggtggcacatggtacacaggtacgcaaattcagcctggtgtcgaaaaatttattaaagattttaacgatgctaaaaagaaaggtgaacatgcctacgatatgacgttaagttatcaaaatnntgacaaaggcttttttaattcccgttttcaaatgcaaatgacattcgataacggtgcacccgatctcaatatcaagccaggccagaaagttgtatttgatgtggatgttgagcacggtccgttgcccatcacaatgttaatgcatggtaatgtcatcccagcactggcagcggcaaaagtgaacttagtgaataatgaactgacacaaccgctatttatcgnnnnnnnnnataaatcgcccgtggaagcgacattgcgattcgcgtttggtggctcattctctacgacattagatgttgcccctgcagagtatggaaagttttcttttggtgagggccagtttacttttaatggtgatagtagttcattgtctaacctggatattgaaggcaaagtcgaagatattgttctgcaattatcaccaatgaacaaagtaacggcaaaaagttttaccattgattctctggcgcgattagaagaaaagaaatttccggttggtgaaagcgagtcgaaatttaatcagattaacattatcaatcacggggaagacgttgcccaaatcgatgctttcgttgcaaaaaccaggctggatcgcgttaaagacaaagattatatcaatgtcaatctgacctacgaacttgataagttaacaaaagggaatcagcaactcggtagtggtgagtggtcattgattgctgaatctattgatccctcagcggtgcgccaatttatcatccagtataacattgcgatgcagaagcagcttgctgcacaccctgaattagcaaacgatgaagttgctctgcaagaagtgaatgctgcattgttcaaagagtatttaccgttattacaacaaagtgagccgaccattaaacaaccggtaagatggaagaacgcactcggcgaactaaatgccaatctggatatcagtattgccgacccagccaaatcttcatcatccacaaacaaagatatcaaatcgctcaattttgatgtgaagttaccgcttaatgtcgtcacagaaaccgcaaaacagcttaatttatctgaaggaatggatgcggaaaaagcgcaaaagcaggctgataaacaaatcagcgggatgatgacattaggtcagatgtttcagttaatcacgattgacaacaataccgcctcgctgcagctgcgttatacaccgggtaaagttgtttttaacggacaggagatgagcgaagaagaatttatgtctcgtgccggacgttttgttcattaaaatactcactcgcctctgctcattcagaggcgagcaaaatttacttgtcctgccgctgtgatgacatcaacgacgtcagaagtcggtctttttcctgccacaatgagttcagccattgctgaaaatggcgcttaaagcttttgtcattgatgtagtcgccatgtaactcatcggcaataggctgtaaatccacatgtacgacaatccgcgtcagtttaccgcttaacatatcgaagaacggctgacggttattgtccggataacacaacgtaacattaagcagtttatcgaattgtttacccagtacatttagcgccatcgcaatgcctgccgcctttggtggcaacaagttttggaaagtggagtgggtttgctgatgtttttcttgcgtgaaacgggagccttcaacgaaattgacaatggtggtgggatgcaggcgaaacttttcacaagaacgccgagtggtttcaacatctttaccacgtcgctccggatgacgtaataaataagcgcgggaataacgcttcataaacggcatatccagcgcccagcacgccaggccaagaaatggcacccaggccagctgttgcttgaggaaatatttattcatcggaatgtgcttacgaaacagcacgcacagtacgacaatatctgcccaactacggtggttacaaataagcagataccagttcttcttacttaacccttccagcccgtgaacttcccattgcaggtgtgggttcagatgcagtaataccgccagaccttcacaccagcaatacatcataaaatcacaaaaacgcgaaacctttcgccaaatgactggcacaggtagcaatagttttacaatcccggcaatgatgatcgggacggaacaaaaaatagtgaccaaaatggtcaatacgatactcagcaaaagggttatcgcagcgagtattctcgtcataatgaatttattcaaaaggttagccatagacagtgcgctaaagaagcgcaaggcgcagattttagcagaaaacgacccaaataacggatgatccttaaggagaaaaataattcatatctatccacattagaaaaaatcccattatctcaattattagggatggatttatttttaactgcatgaaaaacaaagacaaacatcatgctgtaaaaagcatgataataaattaaaagcgatgtaaataatttatgcacaaagttatccacatgacgatttgcgagcgatccagaagatctacaaaagattttcacgaaaagcggtgaaaaactcatgtttttatcctgtctgtggcatcctttacccataatctgataaacaggcacggacattatggttcagatcccccaaaatccacttatccttgtagatggttcatcttatctttatcgcgcatatcacgcgtttcccccgctgactaacagcgcaggcgagccgaccggtgcgatgtatggtgtcctcaacatgctgcgcagtctgatcatgcaatataaaccgacgcatgcagcggtggtctttgacgccaagggaaaaacctttcgtgatgaactgtttgaacattacaaatcacatcgcccgccaatgccggacgatctgcgagcacaaatcgaacccttgcacgcgatggttaaagcgatgggactgccgctgctggcggtttctggcgtagaagcggacgacgttatcggtactctggcgcgcgaagccgaaaaagccgggcgtccggtgctgntcagcactggcgataaagatatggcgcagctggtgacgccaaatattacgcttatcaacaccatgacgaataccatcctcggaccggaagaggtggtgaataagtacggcgtgccgccagaactgatcatcgatttcctggcgctgatgggtgactcctctgataacattcctggcgtaccgggcgtcggtgaaaaaaccgcgcaggcattgctgcaaggtcttggcgggctggatacgctgtatgccgagccagaaaaaattgctgggttgagcttccgtggcgcgaaaacaatggcagcgaagctcgagcaaaacaaagaagttgcttatctctcataccagctggcgacgattaaaaccgacgttgaactggagctgacctgtgaacaactggaagtgcagcaaccggcagcggaagagttgttggggctgttcaaaaagtatgagttcaaacgctggactgctgatgtcgaagcgggcaaatggttacaggccaaaggggcaaaaccagccgcgaagccacaggaaaccagtgttgcagacgaagcaccagaagtgacggcaacggtgatttcttatgacaactacgtcaccatccttgatgaagaaacactgaaagcgtggattgcgaagctggaaaaagcgccggtatttgcatttgataccgaaaccgacagccttgataacatctctgctaacctggtcgggctttcttttgctatcgagccaggcgtagcggcatatattccggttgctcatgattatcttgatgcgcccgatcaaatctctcgcgagcgtgcactcgagttgctaaaaccgctgctggaagatgaaaaggcgctgaaggtcgggcaaaacctgaaatacgatcgcggtattctggcgaattacggcattgagctgcgtgggattgcgtttgataccatgctggagtcctacattctcaatagcgttgccgggcgtcacgatatggacagcctcgcggaacgttggttgaagcacaaaaccatcacttttgaagagattgcgggtaaaggcaaaaatcaactgacttttaaccagattgccctcgaagaggccggacgttacgccgccgaagatgctgatgtcaccttgcagttgcatctgaaaatgtggccggatctgcaaaaacacaaagggccgttgaacgtcttcgagaatatcgaaatgccgctggtgccagtactttcacgcattgaacgtaacggtgtgaagatcgatccgaaagtgctgcacaatcattctgaagagctcacccttcgtctggctgagctggaaaagaaagcgcatgaaattgcaggtgaggaatttaacctttcttccaccaagcagttacaaaccattctgtttgaaaaacagggcattaaaccgctgaagaaaacgccgggtggcgcgccgtcaacgtcggaagaggtactggaagaactggcgctggactatccgttgccaaaagtgattctggagtatcgtggtctggcgaagctgaaatcgacttacaccgacaagctgccgctgatgatcaacccgaaaaccgggcgtgtgcatacctcttatcaccaggctgtaactgcaacgggacgtttatcgtcaaccgatcctaacctgcaaaacattccggtgcgtaacgaagaaggtcgtcgtatccgccaggcgtttattgcgccagaggattatgtgattgtctcagcggactactcgcagattgaactgcgcattatggcgcatctctcgcgtgacaaaggcttgctgaccgcattcgcggaaggaaaagatatccaccgggcaacggcggcagaagtgtttggtttgccactggaaaccgtcaccagcgagcaacgccgtagcgcgaaagcgatcaactttggtctgatttatggcatgagtgctttcggtctggcgcggcaattgaacattccacgtaaagaagcgcagaagtacatggacctttacttcgaacgctaccctggcgtgctggagtatatggaacgcacccgtgctcaggcgaaagagcagggctacgttgaaacgctggacggacgcngtctgtatctgccggatatcaaatccagcaatggtgctcgtcgtgcagcggctgaacgtgcagccattaacgcgccaatgcagggaaccgccgccgacattatcaaacgggcgatgattgccgttgatgcgtggttacaggctgagcaaccgcgtgtacgtatgatcatgcaggtacacgatgaactggtatttgaagttcatagagatgatgtcgatgccgttgcgaagcagattcatcaactgatggaaaactgtacccgtctggatgtgccgttgctggtggaagtggggagtggcgaaaactgggatcaggcgcactaagattcgcctgaacatgcccttttttcgtaagtaagcaacataagctgtcacgttttgtgatggctattagaaattcctatgcaacaactgaaaaaaaattacaaaaagtgctttctgaactgaacaaaaaagagtaaagttagtcgcgtagggtacagaggtaagatgttctatctttcagaccttttacttcacgtaatcggatttggctgaatattttagccgccccagtcagtaatgactggggcgttttttattgggcgaaaggaaagatccgtaatgcctgatgcaccatgtttatcaggccaacggtagaattgtaatctattgaatttatgggccggatacgccacatccggcataagcattaaggtaagaaaattattcgccgtcctgcgtttcttctacaggctgcatctcgttaaaccaggtatccagtttctgccgcagcttgtccacgccttgtttcttcagcgaagaaaacgtttcaacctgcacatcaccgttaaacgccagcaccgcttcacgcaccatattcaattgcgctttacgtgcgccgcttgccagtttgtccgctttggtcagcagtaccagcacggcgatattgctgtctaccgcccactcaatcatctgctgatccaaatctttcagcggatggcgaatatccattagcactaccagaccttgtaggctctgacgtttttcgaggtactcgccgagcgcgcgctgccatttgcgcttcatctcttccgggacttccgcataaccgtacccaggcaagtcaaccagacgcttgccgtcagccacttcaaacaggttgataagctgggtgcgtccaggggtttttgaggtacgagccaggcttttctggttagtcagcgtgttcagcgcgctggatttacctgcgttggaacggcctgcaaaagccacttcaattccggtatcggaaggtaggtggcgaatatcaggcgcactcatcacaaaatgcgtctgttgataattcaaattagtcaaagcggtcgtctccgtcagtcaaagctttgcggcgattatacctgaaccataataaaaggcggatttttcggcgtgagcgttgtaagtaaaagccatacgctttgtgagacattgccgatagtctttatgcgaaatagcagagaaaattctgcgatgcatgtcaaataagctatataaatcagttaattgcttttatataaaactctgaaaatgtgcaaatactgatggcggttgattgtttgtttaaagcaaaggcgtaaagtagcacccatagagcgaggacgctaacaggaacaatgactcaggatgagggtcaggagcgccaggaggcgaagacagaggattgtcaggaagacaaacgtccggagacgtaattaaacggaaatggaatcaacacggattgttccggctaatggaaaaacagggtgtgttggcggcctgcaaggattgtaagacccgttaagggttatgagtcaggaaaaaaggcgacagagtaatctgtcgccttttttctttgcttgctttctgttagattccgccgcaaatctatactgaataaaacggctaaaagacgaaccattatgaaaccatcttcaccatcacgcagcaaaggtcatgcaaaagcgcgtcgcaaaacgcgcgaagagctgaatcaggaagctcgtgaccgcaagcgtcagaaaaaacgtcgtggtcatgcgccgggcagccgcgcagcgggcggaaacaacacgtcaggcagcaaaggccagaacgcaccgaaagatccacgtattggcagtaaaacccctattccattgggcgtgactgaaaaagtcaccaaacagcacaaaccgaagagtgagaaacctatgctttcaccgcaggcggagttggaattactggaaacggatgagcgtctggatgcgctgctggaacgtctggaagcaggcgaaaccctgagtgccgaagagcaatcctgggtggatgctaaactggatcgtattgatgagttgatgcagaaactcggcctntcttatgacgatgacgaagaagaggaagaagacgagaagcaagaagacatgatgcgtctgctgcggggcaactaacggattgccgccgtgggccttcccgttctgctgataacccttccggttatatgttatctggtgtggttattcgttaaantacagcggttgtcgcnnnnncaaaagtggctgcgcaaccggctgatgacccgaaacgggcatccgccggtacgccgtagccgccagagacgccatcggaaggagtgagcatgtctgtacagcaaatcgactgggatctggccctgatccagaaatataactattccgggccacgatacacctcgtacccgaccgcgctggagttttcagaagacttcggcgaacaggcgtttttacaagccgtggcgcgctatcctgagcgtccattatctctctacgtacatatcccgttctgccataagctttgttacttctgcggctgcaataagattgttactcgccagcagcacaaggccgatcagtatctggacgcgctggagcaagaaatcgtccatcgtgcaccgctgttcgccgggcgtcacgtcagccagctgcactggggcggcggaacgccgacgtatcttaataaagcgcaaatcagccgcctgatgaagctgctgcgcgaaaacttccagttcaatgccgatgcggagatttcgatcgaagtcgatccgcgggaaatcgaactggatgtactcgatcatttacgcgccgagggctttaatcgcctgagtatgggcgtgcaggacttcaacaaagaagtgcaacgtctggttaaccgcgagcaggatgaagagtttatctttgcgctgcttaaccatgcgcgtgagattggctttacctccaccaacatcgacctgatttacggcctgccgaaacagacgccggaaagtttcgcctttaccctgaaacgcgtggcggagctaaaccctgaccgtctgagcgtctttaactatgcgcatctgccgaccatttttgctgctcagcgcaaaatcaaagatgctgacctgccgagtccgcagcaaaaactcgatatcctgcaggaaaccatcgccttcctgacgcaatcgggctatcagtttatcggtatggatcactttgcccgtccggatgacgagctggcggtggcccagcgtgaaggcgtgctgcatcgtaatttccagggctacaccactcagggcgataccgatctgctggggatgggcgtttccgccatcagcatgattggcgactgctacgcgcagaaccagaaagagttgaagcagtactatcagcaagtggatgaacaaggcaatgcgctgtggcgtggtattgcgctaacgcgtgatgactgtattcgccgcgatgtgattaagtcgctcatctgcaacttccgtctggattacgcccctattgagaaacagtgggatttgcacttcgctgattactttgcggaagatctcaagctgctcgccccgttagcaaaagatgggctggtggatgtggatganaagggaatacaggtaacggcgaaaggtcgcttgctgatccgcaacatttgcatgtgctttgatacctatctgcgccagaaagcgcggatgcagcagttctctcgggtgatttaaatagtgaatggcgcttcgtttacaaagtagaaaacgaaagcgccatcaatgtgctgagaacaagattgcctgatgcgctacgcttatcaggcctacaaaacctgttgaaaatattgcttttgtaggccggataaggcgttcacgcagcatctggcatgaacaaagagcacttcatcagcaatctgaaactcaactaaacagcccaatcatcgcggcacacagcacggcagcaacagcagtttgcggtgtgtggctgtcaactgcgccactcgataccagattaattattgattccagcataatgactctccccgttttccgggcaagatcatactgaacttatcggaacagtaaagcgcaaaataccagcaatttgcgctcaataatcaatctttacacacaagccgtgaatcactccatccccagctcttttaacttacgcgtcagggtgttgcggccccagccgagtagccgcgccgcctcctgtttatgcccctgcgtatgtcgcaacgcggtcgtcagtaacgtccgctccagctctggctgcgcttcggaaagcagattttgatgaccggaacgtagcgctctgtctgcccactgcgcaagaagcgtcgcccaactgtccggttgcatttgcgaagtactctccgcaaccgttgattcaaacagttcgccaggcaaatcctgaatcaacacttcctgtccggcagccattaccgttagccagcggcaggtgttttccagctggcgcacgttgcctggccacgccagacgcgtcaacgcggcttcggtttccggatgcagcaacttcgcttctacgcccagttctcgcgcggcaacctgtaaaaaannnnnnnnnaggcggggaatatcttcccgacgctcacgcagcggcggcagatgaacgcggataacgttcaggcggtggaacagatcctcacggaacttaccttcctgcacccgctgttcgagattctggtgagtggcagcgataatccgcacatccactttcaccggcgcatagccgccaacgcggtaaaactgaccgtctgccagcacgcgcagcaaacgcgtctgcacatccagcggcatatcgccaatttcatcgagaaataatgtaccgccatcagcctgttcaaaacgcccctgacgaatggtattcgcgccggtaaacgcgcctttctcgtgaccaaacagttctgattcgatcaaatccttcgggatagccgccatattcagagcgataaatggcgctttggctcgcggactgtggcgatgcagggcatgagcgaccagttctttaccggtgccggattcgccgttaatcagcacgctaatagaagaacgcgaaagccgaccgataatacggaacacgtcctgcatggctggcgcttcgccgatgatatcggtcgttgggccgttaagctgaacattacgcggctgctgctgttcctggtaatgactgatggcgcgctcaaccagcgccacggcttcgtcgatatcaaacggtttgggcagataatcaaacgccccttgttgataggcgctgacggcagcatccagatcggaatgtgcggtcataatgatgaccggaagcatcggatggcgctgtttaatctgcttgagcagtgccagcccgtccattcccggcatacggatatctgaaagcagcacatccggcgttttgctcgccagcgcctccagtacctccgngccgttctcaaatgtcgtacaggttaaacccgctccagcgagcgcacgttcaagcacccaacggatggaactatcgtcatcgactacccagactatccctcgttgcataaacgtcacctttatttcctgataggcaggtaaaccgagaactcggtatgccctggccaactggtaaattcaattttgcctgaatgctgatcaatcaaattacgagcgatggataagccaagcccggtgccaccttcgcggccgctgaccatcgggtaaaacagcgtatcctgcaaatgaggcggaatgcctggcccgttatcttccacatcaatccgcgccgccagccgatagcgttcgccgtgtaaggtcagttgaaacgcggtgcgggtacgcagaatgatttcaccgccttccggccccagcgcctgtagcgcattgcgcacaatattcagcaagacctgttcaatttgatccgggtcgtgcgccagttccggcaggctgggatcgtaatcacgaatcaaccgcacgttgtccggcagttccatcgacaccagcgttaccacgcgttcagctactttgtgaatactttcggtaacgcgcgtaccgggcagctgcggccccaacagacggtcgaccagatttcgcagccggtccgcctgttcgataatcactttggtatattccagcagtgacgggtcaggtaatgctttgctgagtagctgcgccgcgccacgtaaaccgccaagcggatttttaatctcatgtgccaggccacgcactaaatcacgggcagcaacttgttgagcatgttgtagctgttcctggcttaagcggcgctggttatccatcggcgccatctccagcaggatcatgccgtccggcatacgctgggccgtcacagaaaggatatgcgagcgaccgtcgatgaccagcgtcacttcgttatcggtaaaaccttgccccgcctccagactttcttgcatcagctcaatatttaatgagaagtagctcaacagttccggtaacggcgtaccaaacaatttgcgggagctttgggcgagcagttgttgcgcggcggggttggcgtaatggatcgccaggttgtcatcgattaacaaaatactgttaatcagcgagttgaggatctgcccagcatcgggctgcgtgcctgttgccataaagcagtctcctgaacaggttgcaccattttagtgcattatagctttttacggataaaaagcgcgaagcatcagagaattgacggagaaaaaagcccatgcaganatgggctgaaagtttccacggcaactaaatcnnnncgtnnttgcgccgggtagtacaacttcaactattagacgctgtagtacagctcaaactctaccggatgcggagtcatacgcacgcggtcatcttcttcgcgacgcagagcgatgtacgcatcgatcgcttcatccgtgaacacgccaccggctttcaggaactcgcggtccagatccagctcgttcagtgcttcttccagagagcctgcaacctgtgggatctctttcgcttcttccggcggcaggtcatacaggtttttgtccatggcttcgcccggatggatcttgttcttgatgccatcaagaccggccatcagcagggcagcaaagcacaggtacgggttagccgccggatccgggaaacgtacttcgatacgacgtgctttcggagaagaaaccaccggaatacggatagacgcagaacggttgcgtgcagagtaagccagcattaccggagcttcgtagcccgggaccagacgcttataagagttggtggtcgggtttgccagggcgttaatcgctttagcgtgtttgattacgccgccaatgtagtacagcgcctgctcagacagacctgcgtatttgtcgcctgcgaacaggttaacgccgtttttagacagcgacatgtggcagtgcataccggagccgttatcaccgaacatcggttttggcataaaggtcgcggttttaccgaagcggtgcgcnncgnnnnnnncaacatatttgtagatctgaatttcgtcagcttttttggtcatggtattgaagcgggtagccanttcgttctgaccagcagtcgctacttcgtggtgatgggcttcaaccaccagacccatctgttccatcaccagacacatttcagaacgaatatcctgagcagagtctaccggcggaaccgggaagtaaccgcctttcactgccggacggtgacctttgttaccaccttcgtattgggtggaggagttccatgcgccttcgatatcgtcgatagcaacgtgggaaccggagatagatgatccgaaacggatgtcatcgaacaggaagaattcaggttctggcccgaacagtacggtgtcggcaatgccagtggaacgcaggtaatcttcggcgcgcttcgcaatagagcgcgggtcacggtcatagccttgcagggtgccaggttcaaggatgtcgcaacggataatcagggtggagtcggcgaagaacgggtcaatcactgcggtggatgcgtctggcatcagcaccatgtcggattcgttaatgcctttccagccgccaatcgaggagccgtcaaacattttgccttcttcgaagaattcagcattcacctgatgagcagggatagtgacgtgctgttctttacctttggtatcggtgaagcgcaaatcaacaaacttcacttcgtgctcgttcagcatcgtcagtacgtgttcagcggacatactttaactctcctggattggtcattgtcgtcgtggtaacgaaatctgcaattnttttggccgtgtcgccgtaaaaaagataaagcgaaaactgtgccaacttttaaattgcccctaaaaggcgttatcatgcttaacatcgtgcaaaagggctgcaccatgatgtgaatgttgcaccaatatagtgcttcaatggaaacattaagcaccatattggtgcaatgacctttggataaccctttttatgctccgtgaaagcgatcacaaagggactctgcaatacttgtttgcggaggatgtttgtgatcctgttttgtagtgcgattaatccgtgtacaataacgcgctatttctaatgcctgaggcaaagttgtgatcgaaaaattgcgtaatatcgccatcatcgcgcacgtagaccatggtaaaaccaccctggtagacaagctgctccaacaatccggtacgttcgactctcgtgccgaaacccaagagcgcgtgatggactccaacgatttggagaaagagcgtgggattaccatcctcgcgaaaaacaccgctatcaaatggaatgattaccgtatcaacatcgttgataccccggggcncgccgacttcggtggtgaagttgaacgtgtaatgtccatggtagactcagtgctgctggtggttgacgcatttgacggcccgatgccgcaaacgcgcttcgtaaccaaaaaagcgtttgcttacggcctgaagccgattgttgttatcaacaaagttgaccgccctggcgcgcgtcctgattgggttgtggatcaggtattcgatctgttcgttaacctcgacgcgaccgacgagcagctggacttcccgatcgtttacgcttctgcgctgaacggtatcgcgggtctggaccacgaagatatggcggaagacatgaccccgctgtaccaggcgattgttgaccacgttcctgcgccggacgttgaccttgacggtccgttccagatgcagatttctcagctcgattacaacagctatgttggcgttatcggcattggccgcatcaagcgcggtaaagtgaagccgaaccagcaggttactatcatcgatagcgaaggcaaaacccgcaacgcgaaagtcggtaaagtgctgggccacctcggtctggaacgtatcgaaaccgatctggcggaagctggcgatatcgtggcgatcacgggcctgggcgaactgaacatttctgacaccgtttgcgacacgcaaaacgttgaagcgctgccggcactctccgttgatgagccgaccgtttctatgttcttctgcgttaacacctcgccgttctgcggtaaagaaggtaagttcgtaacgtctcgtcagatcctggatcgtctgaacaaagaactggtacacaacgttgcgctgcgcgtagaagaaaccgaagacgccgatgcgttccgcgtttctggtcgtggcgaactgcacctgtctgttctgatcgaaaacatgcgtcgtgaaggtttcgaactggcggtatcccgtccgaaagttatcttccgtgaaatcgacggtcgtaaacaagagccgtatgaaaacgtgactctggacgttgaagaacagcatcagggttctgtaatgcaggcgctgggcgaacgtaaaggcgacctgaaaaacatgaatccagacggtaaaggccgcgtacgtctcgactacgtgatcccaagccgtggtctgattggcttccgttctgagttcatgaccatgacttccggtacgggtctgctgtactccaccttcagccactacgacgacgtgcgtccgggtgaagtgggtcagcgtcagaacggcgtactgatctctaacggtcagggtaaagcggtcgcgttcgcgctgttcggtttgcaggatcgcggtaagctgttcctcggtcacggtgcagaagtttacgaaggtcagattatcggtattcatagccgctctaacgacctgactgtaaactgcctgaccggtaagaaactgaccaacatgcgtgcttccggtactgacgaagccgttgttctggttccgcctatccgcatgactctggaacaagctctggagttcatcgatgatgacgaactggtagaagtgactccgacctctatccgtattcgtaaacgtcacctgacggaaaacgatcgtcgtcgcgccaaccgcgcaccgaaagacgattaatttcgttttttagtcataaaaaacctgccagcgatggcaggtttttttttgcctgtcgtgagcgcacaccaatgcgagtatctcccttataagtctgtggttacgtcaatagagagctttgtcacaattatctgcaaagtcatacgccgttaattgctttcttttttggcgtaagcgtaagatgcttcatctggtttaaaccaaaaggattaaacaatggcggagaatcaatccaccgtagaaaatgcaaaagagaaactggatcggtggttgaaagatggcatcaccacgccgggtggaaaactcccttcagaaagagagctgggagaactgctgggcattaaacgtatgacgctgcgccaggcgttgttgaacctcgaggcagaatccaaaatcttccgtaaggatcgtaaggggtggttcgtgacccagccgcgatttaattacagtccggagctgtcggcgagctttcagcgggccgcaattgagcaagggcgagagccttcctgggggtttaccgagaaaaaccgtaccagcgatattcccgagacgctcgcgccactgattgcagtgacaccatcaactgaactctatcgcatcaccggctggggggcgctggaaggacataaagttttctatcacgaaacatatattaatcctgaagttgctccgggttttattgaacaacttgaaaaccactcattttctgcagtctgggaaaagtgctaccaaaaagagacggtagtaaaaaaattgattttcaaacccgtcagaatgccgggcgatatcagcaagtatcttggcggttctgcgggtatgccagcgatcttaattgaaaagcatcgcgccgaccagcaaggcaatattgtccagatagatattgaatattggcgatttgaggccgtagacctcatcattaatctgtaggtgttttatggtgacaataaataacgcaagaaagattctacaacgtgtcgacactcttcctctttatttacatgcttatgcctttcatttaaatatgcggctggaaagagtgttgcctgctgatttacttgatatcgcaagtgaaaataatctacgtggcgtcaaaatccatgttctggatggcgagcgtttttctcttggtaatatggacgataaagaactctctgcctttggggataaagcccgccgtctgaaccttgatattcatattgaaaccagcgcctcagataaggcatctattgacgaagccgtcgccatcgcgttgaaaactggggcatcgtccgtacgtttttatccacgttatgaaggtaatttgcgcgacgtattatcgatcatcgctaacgacattgcctatgtgcgggaagcgtatcaggatagcggcctgacttttacgatcgaacagcatgaagatttaaaaagtcatgagttggtgtcgctggtcaaagaaagtgagatggagtctctttccttactgtttgattttgcgaatatgatcaatgcaaatgagcatcccatagacgccttaaaaacgatggcaccgcatattacccaggtccatatcaaagatgccttgatcgttaaagaacaaggtggcctgggtcataaagcctgtatttcaggtcagggagatatgccgttcaaagagttattaacacaccttatctgcctcggtgatgaagaaccgcaggtgacggcatatggcctggaagaagaggttgattattatgctccagcgttccgctttgaagacgaagatgataatccgtggatcccttatcgccagatgagtgaaacaccattgccagaaaagcatttgctggatgagcggttacgtaaagaaaaagaagatgcaattaatcagataaatcatgtgcgtaacgtactacaacaaatcaaacaagaggcgagccatcttctgaaccactaacaagttttaactcatacgcagttaataaaaccattccataagaatggtcggtatcttattgcctttaaaacagtgatttnnnnaatcgcttaggggatgttatgctcacgaaaaagaaatgggcgttatttagtctattaacactgtgtggcggtacaatttataaattaccgtcgctgaaagatgcgttttatatcccgatgcaggaatatttccatttgaccaatggtcaaattggtaatgctatgtcggtaaactcatttgttaccacagtgggcttttttctgtctatttattttgccgataaactaccgcgcagatacaccatgtcattctcactcattgcgacaggattactgggtgtttatttgacgacaatgccggggtattggggcatcctctttgtctgggcgctatttggcgttacttgcgacatgatgaactggccggtcttgctcaagtcggtaagtcgattgggcaatagcgaacaacaaggtcggttgtttggcttcttcgaaacagggcgtggcattgtcgataccgtggtggcattttctgcgttggcagtatttacctggtttggcagtggcttattaggttttaaagcaggcatctggttctattcccttattgtgattgccgtaggcattactattttctttgtcctgaatgacaaagaagaggcaccgtccgttgaggtgaaaaaagaagacggggcatcgcaaaacaccagtatgacctcggtgctgaaagacaaaactatctggcttatcgctttcaacgtcttcttcgtttacgcggtttactgtggcctgacattcttcattccattcctgaaaaacatctatctattgcccgttgcgctggtgggggcttacggcatcattaaccaatactgtctgaaaatgattggtggaccgattggtggcatgatttcagataaaatcctgaaatcgccgagtaaatatctatgctacacctttatcatcagtaccgctgcgctcgtactgttgattatgctgccgcacgaaagtatgccggtctatttagggatggcatgtacgctgggctttggcacgatagtctttacacagcgagccgtattttttgcacctatcggcgaagcaaaaattgctgaaaataaaacaggcgcggcgatggcgttgggtagctttattggttacgccccggcgatgttctgcttcagtctgtatggctacattctggatttaaatccggggattattggctacaaaatcgtgtttggcattatggcctgcttcgcattctgtggtgcggtggtttccgtaatgctggttaagcgtattagccaacgtaagaaagagatgctggcggctgaagcttaattaatggccggatgtacttaatccggccaacgaaaaccgtatcaaccgtaggccggataaggcgtttacgccgcatccggcagtttcacatcagaagaaatacttcgtcccgatacgaatctggttttgctcgcggtggtacggttccacgttgcgatctaaccaacgcaattcaatatagggcagccagtgctcgttaatgcggtaacggaaggtgttagtgatttcccagtgatgcttcgtgccattgccgctattgaaatcattaatgttataaaaataatgcggctcaaaggtatatgagaacttatcggtaataataaagttccagtagttgccaatctcgtagctgtcattattatccagatcaccgtttaaatcggttgagctgtagttattatggttaaaacggttgcgcactgtcaggttaaaccacggagtaaatttgtagttaacatccagataaacagcaccacccgaaccgatactcttatcattaattaagccaccgggctggatggttaatttatcggttggtttaaataacggataccaaccttcgatttcgttatatccatgttttagttcatcttctcgctgaaaggtgtaggtattggttaacataatacccgcgcccatatcgaagttataacccacacgtagcataacctcgccctgatcggaggcgagattatatgcctccctgttttcgacgtatgcgccagcgaatactgaggcagaggtcagagaagataataaaattattgcattaatatttttcataataagtccatttttaaacgtagggaggccgccacccaccaggatggaaatagcggctattgacatttataacgttacggaagccgttttttcttctgtcgccatctctttatttttgcgttggttgatttcctcaataatcaacgcaaaccgtttttcattgagtgtgtaaaagaatcccatcgtcaatgcagcaataattgccagtgcacaaggccagataaaaatgagctgacgcaaaccctgtaatgtcgcatcactttgcgcgatgttgggaacataaccgatttgcgtcagcataatgcctggcaagaagccagcaagtgcggcagaaattttacgaaagaaggtataaccggtataaacagaaccttcggcacgaataccggttttccattcaccgtaatctacggtatctggcaccagtgcccagttcaggctgtttacaaaggccgtgccaaaaaaggcgatacaagagaacatgacgaaagtgaaagagttacttccccagaaataattcaggatatcaccaaccgcccatagcaccatgccagntaaataaacctgttttttaccaaaacattttacagttaatggcaccagtaatacgccgacgaggatgcatcccatactgaagaatcccatccacgacaataaattaatatcattcagcacatactgggtgtaatagacctgaatcgccagtttgatattaaatgccgccagggtacacaagttagcaatgcataaaaccagcaatggcggattccgaaatatcgcgcaaaaagatttgagaatactggctttatgtccggttggtgctgtgtccacataatgctctttgacgcctctgtagcacagcatcataaaaataaagccaccaatggagaacatcagtgccgcacaggcataaccgacggttgagtcagaaaaaagcgactgcaacggaataaacgccacggtacaaatcaatagccctatggttgcaccaccctggcggtaagccgcgagctgcgcgcgctcattcgggtttttagtaatggccgggatcatcgcaccatacgagcagttcatcagactgtatgaaagtccaaacatcataaacagcgcggtggcaatcgtcgttttaaccggcaaactaaaagtggtggcgataaactggagcgttgcaattaacgccnccggaaccgctgcgtataaaataaagggacgaaatttgcctttaggcccaatannnnnccgcgaatcgagtaaaaatccggtgagcatatcggtaaacgcggtaaaaaacttcgccaccagaaagataatcccgccatagtaagctggcatccctaattcatcggtataaaatttgaggagatacagagtaccgatgctaagcattaaattcgaaccaacgtcgcccataccataggcgattttttcccgcagattcagttttaatgtcagtggattatggtcagacataatcactccttataacgccccgcagggcattgtttattattattacgccgtgcgtttacgggcttctatttcttcaacaatgcggacatacatcttctcgttcaggctgtagaagcagcccatcgccacaatggtgactaccgccagtgcgcttgggtagatgaagatcagctggcgcaacccttcaatggtgtggtcagcctgcgccacgttcggcacataaccgatttgcgtcagcatccagccggggaagaaaccagccagcgcctgagacactttgcgaaagaaggtgaagccggtgtagaccgttccttccgaacgaacgccggtacgccactcgccgtactcgacggtgtcggaaaccagcgcccagttcaggctgttaacaaacgctgagccgaagaatgccaggcaggagaacgccacgaagctgaccgaaccgccgctgaagaaatagttgagcagatcgcccagcacccaaatcagtaggccgccgatatagaccttcttcttaccaaaacgcctgactgcgccaggcatcaggaacacaccgatgaaaatacagcccatgctgaaaaatcccatatatgacaacaggatgggatcgttaagtacgtactgggtgtaatagacctggatggcgagcttgacgttaaacgcccctaaagtgcagaggttggcaatgcacagaatgaacagtgggcggttaccggcaattgcgcggaaagattgcagcaggccaggcttttgcgccggattggctggttgggtttcgacataacgctctttcacgcccgagtagcagatccacataaacagcaggccgaacagtgaaaacagcgtggcggcgaagatatagccaagttgctgattaccttcgataagattcataaccggcacgaatcccaccgtgcacagcagcaggcccagcgtagcgcctccctgacgccatgccgccagtgatgcgcgctcgttggggtttttggtaatagcaggcaccatcgcgccataggagcagttcatcatgctgaaaaacagcccgtagagcataaacagaatagtggccatcaccgttttaccagtgacatcgaacggtgtgccgataaagttagcgattgccaataaggtgaccgggaatgacgcgtacaaaatgaaagggcggaacttacctttcgggccaatcttacgccgggaatccaacatgatgccggttcccatatcggtaaaggcggtaaagaatttcgagatcaaaaagataatgccgccataggtgcctggtagccccagaacgtcggtataaaacttcaaaagataaagcgtaccaatatccagcaggatgttagaggccagatcgccgataccgtaagagagtttctctttaaagggcaggcgcaaagttgccggatcttccgttgtgatgtgactcatcgttattctccatttgcccgtgagtttccccacgggcgggcatgattagatgttttttaacgaggcgaacagtgcagcccattcgctgtcggcgcgataaaagaccggcggcttgccgatgggcgcttcaacagttatttctccaccgtggaaggtttctccggtccaggcgtggacccagttatcctctggcagatagagcgtccagtcgctgcgaccttcttcgtgtaccggagcaaccagaatgtcgcgacctaacaggtactgatatttcagggaataggtctgcgcgtcgtcttcgtaatgcaggaacagcgggcgcataaccggcaggccggacttcgcattcagcgcgacggcctctttcaggtaaggtttcagggtggtgaagacggtggtcatacgggcgaaatgggcgatggtttccgcgtcgccgtcaaactgccagttgtcgccaggacggttaccttcgtgggtgcgcatcatcggcgtgaaggcgctgaaatcgcaccagcgcagcagcagctctttgctgcgcttcatctcaaacagggtggtataaccgccaatgtcgctgtgatgccggccatgtccggtcattgccagagatagcgccgccgggacaaccgacgccaggccatcgtccagactccagtccacgttctggtcacccgcccacatcatggtggagtatttctggctaccggtagaaccggcgcgcataaagaagaggatctcgccgagcttgcccgtttcttcaagggcttcgtagttacatttcgcccacagcgcgggccaggcgttatgcataatttccgcgctgatgccgttatgcaggtacgtgtcggtgggcagatactcgccgaagtcagccatccagccgccgcagccgagttcaatcatgttctttttgataacttccttgaaccaggcgtaggcttccggattggtgagatcgacaacgccgccgtagaactcgccaaactccaccagatagtcgccaccggcgacatcttttgccagataaccgcgctttgccgcctcttcgcagagatctttatcactggcaacatacgggttgatataggcaaggaactgcacgccctctttgttccactgcttgatacgcgaatccagttgcgggtagttttcgctgttccacttccagttccacatcacgcgtttgccaaaagaggtcatacgaataccggaccagtcctgcgcccagatgccgttgaccttcacgcccgcgttacgcatggtgtccagtttcttctggcacacttccgtcccgccctgaatgccgagcgttactccgtcataaatccagtcgggcagttctggctggcgtcccagcagggcggttaatttttccagcagggagatgtatgtgtcagcacattcaaaacgcagcgttgctttgtcttcccacagcgccagttcatggtattccggggcactaaagtcgaagttcatatagcaactgttatcaacatggcagtaatacttctgcgtgctgacaaacgtaggctgtgggaagaaagtccagtaatagtcgccgcccgcattttctttgcagtcggcctgccaggtgacataggtttgtttgttgcgaccaacgccttgttcactggtccatagcgggaacggtttgccgcgcagatcgaagtaggaaaactgttcgccgcagccgtagatatggtcctctggttgagcggcaaggcgcagccagatgcggttgtggttaaggttgtcgttttgtagttccagcaataaacggccctgatcgtcggcagagatattcagcgtggcgctaatgtcagaaccacgactgaaatggattaaccaaccatccggtgactggctgacgatggcgtcggtaagcgcaattttctcctgtagtttatctttaatgctgaaattgccgcggaacatatcgatgtccgctatacctgagccaatccataaacaaggattatctttgctatgggttaaaataagacgttgtcgaaaatgtagggtaaaactgtcgttattctgatgaaattcaaaatctggtaattgtgggcgtggcgtatccataaataatctccatagagtataaagctaatatttcatgccatcctgttattacaggtttaattaattaaagaatgtgtgcggatataaatttaaacccgcataagtgattatttacttgcttcagcctgacggattgccgccacttttttaccaaataccagttgcagtataactaacaaggtaaacggaggtagaagtgcggcagcggcgggaattcccagcgcgccttttatcaacatggaaccggaggcaatcagcaataaaaagaccatcacacggaacactttgactgaaatacgtttatgcacatattgtccaaccagtgaaccgaggatcatggtgggaatacaaaacagcaccagtttaaagatcgaaacagtcaaaattccgctggtcgccagcccgccgatcaccgcgatgttgtttgcggtgaagaaagcgttcagagtgccacgaaatgccgccgggcctaagttacgcagcataccgtagataaccatcggtggtccgttggttgagaaagctgcgcctaatgcgcctgctactgcaccgataggtgcggcgatccagctacggtcataaatcggcaggcgtggaataaacatactgtaaaaggagtacaggataaggaatccgcctaagcccactttcataaaatggtcgggtaaatacgacagtgcatataaaccgacgggtattcccagaaacgagaaaataatcagtaccattgccgatcgccaatccgtttctttacgtgacagccaggtggcgtacaaggcggtcgcggtgccgacaattaccgagagtggtgttgccatttttacggggagcattaacgtgacgagcggcatagtggttaaaccaccgccaaatcccgcgcatatccccacaaaggtataaagaaacattaacgcgataacgatacataccacgtttgtttccagcatgaccccatccgatgaaaataacgtaaaaaagtccataatatttcctgttgtgtaaatacaactctaaacaatgatctcgttcttttcttaataaaattaattgtgttgcccgtaaatattaaaaaacaggcggtgcgttttccctggttccagtaataataagtcgagacctgaattaaaggcgttaggcgggcaactcataggttcaactgccagtccctgacgctgtaatttttcaccgctataaatttgtacccagggttgatcggaacaaaggctaaccgaaagcgcctgttgtggatgggtaatggttatttcccacagatcattagcggttttaaaggtgtggtcgatttttgtcgcggctatttttttcgcctgcgtgaaatttaaatccagctcatcaacgtggtgaagcgttgtcggattagcgtgctcatcgacggcataaacctggtttgccggaagctggaacagatattcatcaacagatgttaagttgcaggttaaataaggatgaatacccacaccatagggtgcggtcacagtaccaatattctgacttgcgatctcaacggaaagacccgtgcgtgcattgagcgaataaacaacctgcgaagccagcataaacggatagccgtaactgggcggcagaaaagctgtcagggtaacgctggtggcggttaattcgctgatttgccagtcacgccaggcgagcagcccatgaatagcggcttttgaaccatgttcattaatgggtaactgatattcctgcccctgatagcgataacagccgttggcgatccggttcggccacggaataaggactttgcccagatgtgccagcggcatctcttcgggtttatgtggaataactaaatgacagccctgaaaggttaattcagccagacctgcaccgacggtcacaatggtcgcgtgataatcccccgcggcaagtgaaacggtntgtccactgcaatgcatgttggtgatttgcatacgaggtacctttattgaataacgacatacccggcgtgcagcctgatatgtcgtttttttagtcagttatttcgcgttaatatccagcagacccgccgcaactgccggagccaggcctggcgctaacgggatacgcgggatcaccaggcaatgcagcaggtgataaatatcctgtttgccgtcccagactttggtggtgaccttattgtccgcatccagctcctgccaccatgaaccattttcgtagtccatcaggtatttgatgcagtagtcccaccatgtctgataccaggtttcgtactggcgatcgccggtgacggtgtagagcgcgtaggccgtacccatcgcttcgacgataggccaacgcacacgttcgcggaccaccggttttccttcccagtcaacggtataaacaatcccgtccgcaccatcgggtgcccaggcatcacgcacggtggcgttaaacagacctttggcatcttctagcagccatgctggcggttgttcgcaacgggcttccagggccgcgtggatgtgcagcattaaacggccccattcgatccagtggcctggtgtacctccgaacgcgcggaagcggtgcgccgggttatctttgttgtaatccggcagcggattccactgggtatcgaagtgttcgttaacgcgataatgattatttcttgcgacgtcgtggataatcacggaagccacgcgaatcgcgcgatccagccattttttgtcatgcgttacgtcataaacaattaagaaagcttccactgcgtgcatattggcattgccgccgcggtactcttcggttttgctgaannnntcgtcccaggactccaggcacatctgctcttcttcgctccagaagtatttctcgataatttcaatggtgtaatcgagcagcttgcgcgcttccgggtgacccgttgtgacggcgctggcagcacccagcagagcaaagaaatgttgatagccctgtttggaggcatccaccacgccctcgtcattcacacaggcataccagccgccatattttttatcgcgcagtgcgccgttcatggctttaataccgtgatcaaccaacgagtaagcgccaggtcgacccatcgccgcagcaacggaataaacgtgcaacatacgagctgtgatccactgatgggtgcccatctcttctttgatttgccctttattgcctaaccagccaaatccggtcggtactacggaatttttaccaaaatcaaagntgcgatcggtttcctgttccagccaacggttgtgacttaaagtgttaaaccatttcatttttgtatccccattttaacggcgtttagccatcatttcgtcgacgatatcgccaanttgttgtaatttcggtgcgcaaacgtcacgcagcatcagctcgttgtctggtnaaccgacgaccgatgcccagacagcncgaccagccaggaagcccgatgcacccgctgtcattgccacgcgtacggcacgcgggaacagtttttcgtcgacaccggaagagaggatcacccacggcatattgatatggtcattcagacgttgtgaagcactgagaagctcttgttgcggacctttaccgtaaagcggcatttcaactttgtagaggtcagcgccactgtcgcccagctctttggcggcatcgatgatcgcttgttcgcgatcgaatttatcgccacgacgtggtgggcggacgactggctcaataatgcttaccaggccgtgtgagtggcacagttcgttaaactctttcaccatatccaggcgttgctgcgcatcttcatcactacgccacagcaccagcagttttaaggctttgccaccgtcttgtttgatctgtagcggattgattttgcggtcaatgaccacgctatctaccggaataccgttgccaggaatgaactcatcggcggcgacaatcatggcgcaacttttggcaatcgcgttttgctcaaccacctggcggtaacagaattgttgatctaccagaatcgccgaggcataaggcgagagggtcttcgccgcgttaactttgaaatcagttaaaacgctatcggctaccggagcgggtgccccagccgcnnnnnnnnnnnnncgcatggcttcgcgctgatcgaccgccagcatggcaaaaccgcccgatgcgcgcgtaatgtcgttgatggtgtacttattcattnatttattcctttatccagtcgttacatttttactttggcagtcatcccggcactgacacggacctgttccagaatggcgnaccagtcctggcgaccgcgacccgctgcncgcgcctggctataaacctcccgtgaggcggcccccagcggcattggcacatgcagctggttggcgacatcaagggcgatgccaagatccttatgggcaagatcgatcatgaaggcgggagaaagatccccgctgaggactttgttcggccaggaagtggtgaagtggcctttaccgnnnncggtaccgctcatcactttgacggcaacatcgaagggaagattcagggcttcgcacaaaacggcagcttctgccgaaagcgcattgagcgcgatgctcatatagttgttgatgagcttaacgcggatccccatgcccggaccgcctgcgttgatcaactcactgcccatcgccatcaggatcggcgtggcacgttcaacttgttcagcggtgccgccagccagcagtaacagagtaccggtaatggcatttgcagaagtacggcctaccggaacatccatcatgttgaagcctttggcttgcatatcggcaatcaatttatcggtttgcagcggatggatggtcgacatatcaatgaccagcgcatcggtagataagctttcgcaaacgccgttttcaccgaacaacacgctgcgcaccagatcgccattcggcaacatggtaatgataaattcggcatctttagcggcctgcgccgggttggcggcgggagtcgcgcctttgtctaccagatgccgcacagcctcggcattcacatcaaagacgcgaagttggtgcccttgctgcaataaattgctcgccattggcgaacccatttgtcctaaaccgataaacgcgattgctgccataaccttctcctgaatacngtgatgtcactttttgtcatttatgacacgctttgattgtctgtttttgatcgtatttgtaatttatagtcaaaaaattgacagccgtcactttttaaacaattggtgaaattaaaatgaacgcatcccaaaatgtttaaggaatgaccatgattcgtgttgcttgtgtaggtataaccgtgatggatcgcatctattacgtggaagggttaccgacggagagcggtaaatacgtggcgagaaattatacggaagttggtggcgggccagcggcgacggcagcggttgcggcggcaagactgggagcgcaggttgattttattgggcgcgtcggtgatgacgacaccggcaacagcctgctggcagagctggaatcctggggcgttaacacccgctacaccaaacggtataaacaggcgaaatcgtcgcaatccgccatcatggtggatgccaaaggcgagcggataatcattaactaccccagcccggacctgctgcctgacgcagagtggttggaggaaattgatttctctcagtgggatgttgtgctggcagatgtacgctggcacgacggcgctaaaaaagccttcactctggcccggcaggcgggcgtgatgaccgttctggacggtgatattacgccgcaggatatcagcgagctggtggcattaagcgatcatgcggccttttcagaaccgggtctggcgcgcttaacgggcgtgaaagagatggccagtgcgctaaaacaggcacaaacgctcacaaatggtcatgtctatgtgacccagggcagcgcaggctgtgactggctggaaaatggcgggcgtcaacatcaaccggccttcaaagttgatgtggtagataccacaggtgcgggtgatgtttttcacggcgcattggcggtggcgctggcaacaggtggggatttagcggagtcagtccgcttcgccagcggtgtagcggcgtcgaaatgcacgcgtcccggtggacgagccgggatccctgactgtgatcaaacccgatcttttttgtcactttttgtataaaatgccagggtgatggtttttcgaggaattttcatgagccttaccgaactaaccggtaacccgcggcacgaccaactcctcatgctgatcgccgagcgtgggtatatgaatattgatgagctggcaaatctgctggatgtctccacgcagacggtgcgccgggatattcgtaaattaagcgagcaaggcctgattacgcgccatcacggtggcgcgggtcgggcttccagcgtcgttaatacggcgttcgagcagcgtgaggtttcgcaaaccgaggaaaaaaaagcgattgccgaagcggtggcagactatattcctgatggttcaacaatatttatcaccattggtacgaccgttgagcatgttgcccgggcgttacttaaccataatcatttgcggataatcaccaacagcctgcgtgtggcgcatattctttaccacaacccgcgctttgaagtgatggtacccggcggtacgttgcgctctcataatagcgggatcattggcccttcagcggcgtcctttgtggccgattttcgtgctgattatctggtaacaagcgttggggcgattgagagcgatggcgcgttgatggagtttgatgtaaacgaagctaacgtggtgaaaacgatgatggcgcacgcgagaaatatcctgctggttgccgatcacactaagtatcatgcttcggcggcggttgaaattggtaacgtggcacaggtcaccgcgctctttaccgacgagctgccgcccgctgcgctaaaatcacgcttacaagacagccaaattgaaatcatcnttccccaggaagacgcgtagatttttgtgactgttgacctggcttcataccttgccacatagccaaacccatcctttcccgctacagttaatttcttgtggcgcgaaaggaggcaaaaatgctctatatctttgatttaggtaatgtgattgtcgatatcgactttaaccgtgtgctgggaacctggagcgatttaacgcgtattccgctggctacgcttaagaagagttttcatatgggggaggcgtttcatcagcatgagcgtggggaaattagcgacgaagcgttcgcagaggcgctgtgtcatgagatggctctaccgctaagctacgagcagttctctcacggctggcaggcggtgtttgttgcgctgcgcccggaagtgatcgccatcatgcataaactgcgtgagcaggggcatcgcgtggtggtgctttccaatactaaccgcctgcataccaccttctggccggaagaatacccggaaattcgtgatgctgctgaccatatctatctgtcgcaagatctggggatgcgcaaacctgaagctcgaatttaccagcatgttttgcaggcggaaggtttttcacccagcgatacggtctttttcgacgataacgccgataatatagaaggagctaatcagctgggcattaccagtattctggtgaaagataaaaccaccatcccggactatttcgcgaaggtgttatgctaaaaaccattcaggacaaagccaggcaccgtacccgtccactatgggcctggctaaaactactctggcaacgcattgatgaggacaatatgacaaccctggcaggtaaccttgcctatgtgtcgttgctctcattagtgccgctggttgccgttgtttttgcgcttttcgccgcttttcccatgttttccgacgtcagcattcagttacgtcactttatttttgccaactttctgcctgctactggcgatgttattcagcggtatatcgaacaatttgttgccaattccaacaagatgaccgccgttggggcgtgcgggctgatcgtcaccgcgttattgttgatgtactccatcgatagcgcgttgaataccatctggcgcagtaaacgagcgcgacccaaaatttactcgtttgccgtgtactggatgattttaacgctggggccgctgctggcaggggccagtctggcgatcagttcctatttgctctccctgcgctgggcgagcgatctcaatactgtcatcgacaacgtgctgcgtatttttccgttgctgttgtcgtggatctccttctggttgctgtacagcattgttcctaccatccgcgtacctaaccgcgacgcgattgtcggcgcgtttgttgctgcactcctgttcgaagcaggaaagaaaggtttcgcgctttatatcaccatgttcccgtcatatcagctcatttacggtgtgctggcggtgatccccattctctttgtttgggtctactggacatggtgtatcgtcttgcttggcgcggaaattactgtcactctcggggaataccgcaaactaaaacaagcagctgaacaagaagaagacgacgaaccatgattgcattaattcaacgcgtaacccgtgccagcgtcaccgtggagggagaagtgacgggcgaaattggtgcgggacttttggtgttattgggtgtcgaaaaggatgacgacgaacagaaagcaaaccgtctgtgcgagcgtgtgctcggctaccgcatctttagcgatgccgaaggcaagatgaatctcaacgtgcaacaggcgggcggcagtgtgctggtggtttcccagtttaccctcgccgcagataccgaacgggggatgcgcccaagtttctccaaaggtgcatcaccggatcgcgcagaggcgttatatgactatttcgtcgaacgctgccgtcagcaagagatgaacacgcaaacaggacgcttcgctgcggatatgcaggtatcgctggtcaatgatggccccgtgacattctggttgcaggtatgagccagcttccagggttgtcacgggaaacaagagagagtatcgctatgtatcaccttcgggttccacaaacagaagaagaattagagcgttactatcagtttcgctgggaaatgttgcgtaagcccctgcatcaaccaaaaggttcggaacgcgacgcgtgggatgcgatggcgcatcaccagatggtcgtcgacgagcagggtaatctggtggcggtaggccgactgtatattaatgccgacaatgaagcgtccattcgctttatggccgttcatcccgacgtgcaggacaaagggttaggcacgctgatggcgatgaccctggagtcggtggcgcgtcaggaaggcgttaagcgcgtgacctgtagcgcccgtgaagacgcggtggagtttttcgccaagctggggtttgttaatcagggagaaatcaccacgccaaccaccacgccgattcgccattttttgatgattaagcccgtcgccactctggatgatattttgcatcgcggcgactggtgcgcgcagctgcaacaggcgtggtacgaacatatcccgcttagtgaaaaaatgggcgtgcgcattcagcaatataccgggcaaaaatttatcactaccatgccagaaaccggcaatcagaatccgcaccatacgctgtntgccgggagtttattctcactggcgacgctcaccggttgggggcttatctggctgatgctgcgcgaacgccacctcggcggaacgattattctggcggatgcgcatatccgctacagcaaaccgattagcggtaaaccccatgcggtagccgaccttggtgccttaagcggcgatctcgaccgtctggcgcgcggacgaaaagcacgggtgcagatgcaggtcgaaatctttggcgacgagacgccgggtgcagtgtttgaaggcacgtatatcgttctgcccgcgaagccatttggcccgtatgaagagggcgggaacgaagaagagtagctgatggagaggggcggtgctgcctctctcattcaggtcatttatattagtccttggctatttcggttatattgaataagaactctataaatttttattcttcgttggctccatacgtgtcttgctacatcactgttcaggagcatttaaatattatttgtagagctgtatagcaattatcgcagataatgcttaattcatcatcttagttcaggtttgagcgatttttgatagtcaaaaccccctctggtgccatagttttctcataaatactttaaaaatctatagctaacaaacattatgcaaagataatgggctggcatcattgtcagtatcattcatttactgctctggatgttataaatanttatgtagcatgtttgctcttaaaccgtgggaaggaggctgtaatggttgccaatattaatctcattaaacaagaaagttattctgttgttaatttagaaaaacaactaatgagtaatgaatcaccgaagcaatcgctattaaatgatttttcacatcgccttaaaatggaaggtgaggaacaactgttccattgtgttaacgaactgaagtatggtttgtcgagtaataatgaatatgacctgtttaaaaatagagaaacctcactgtggaaacgcaaagtaccagaaagcgcagcgctggcaatgacgggaacagtatataaattatttggtagtcgcttactcaacgcccgcaatcagttagataaaaatctcctcgaaatggctatgcaaatggtttatggcaaagatatggtgacaaagtccggggatatattgattgatatacaattaaataaggatggcagcctccagagtaagcactacacatttgatgtaggtgaagttataaacagttataatattgacctctttgtgaatgcttcgagtattaatcaaacttacttacatgataaaaatcctggtgatgttattagcctgtatggcactttagataacattcctcttgtagttaaggaatgcacgggtaaaaatcatcaaattaacgttaaagccaaattgccacaagaacgaagtgaaaaagttgaggatatgtgtgaaagaatgagaggtggcatctctatgtttaatcacaccacaaaaacagctggtaatatagagcataatttgcagctaagttttctcgtggattcacggccgtcgatcaccaataaatactcagccaaagatgtagcgccagacatacttgtattgcccgtcaacgtatatcatgcggattttaaaattaaaatcaataatgcagtagagaagacttcgtcaattgtgttatgtgctgtgcaaaaaaatctccatgcagcaaggaaggttcttagcgggataataggtaatgtaccaaaaaataataaaccaaaaacaatcatttttgatttacgttttcttagtgcaattaagcagaaagtttttttgggcagtgaacaaccgttgtttgtaaagcataccgcaatgatgagggaggcatgtaaggaattaccgcagctagtggagtatgttcctttagcctgtgaagcgcatagccatcgcagcgtcgcccttgccaaaaccgtggctgcacccatcatggcgacaggtgtgggcgcggctttaatgtatgcaacatcatcaggaccgtattatgcgcaaagtctttctggttcgccggatatcgagatgataaaaaaacgcatggctgaattgtttaaccagtcggatacttctgtgcgcaacaaatatcgcccggcttttgataaatggaataaactggtagataaattaaatcacgaaagaaatacagttccgtttgcgtgtttgaccaccattatagcgacagcgataaatgaaactcctgagggggatacgaatgttgccgttgtgatggggtgtaaatctgcgaaagatcgcacgatatccattgtccttggcaactcgatgttgcaaacactctttgaaaaacgcctcgccgatgatggagaaatagaaaacctttttgatcaacagggatattttagttgcgattcattaacagccgaagaagtaatgatgttaaaagacctttttgatattcgagttcttcatctctctaacaaatttaatgttgggttgcaaggtaatatcaacacggatgttttacaagattcgttttttannnntgtcgatttcattcatgaatctaactcgtataccgtagggatgggagtctgaagagtaaaactcattaggattatcagaattcggccaatgcattgcaaaaatgaaatacaaagagagatgtgtgcaggcgcttagccgcgaggggcatggcgaagccatacagaaagcaccagcattcagaactcctgtgaaagcggcatagtgccgctgctcaggagttttgttatgacccgtatcgtgctgaacgttgccaccctatgatgcgattaaaaaaactcaccgtcgagccgatgattgacgtcaatgctatcggatgatgccgggggtgttccggaaggaattccttgtttcccgaactgttaccaacaaaattataacgatgagcaagtaaagaccggttggtggcagtactgaccggtctgtgatggaagattaatttcaccttaaatcctggtgctgttaggatgctgacgtttttcgggtacaccattcagattatgcaaataaagattcaatgaaaaaataaatatccctgaatataatatattcgtagcacccataactcatcctgggcgataactaaaccatttttgagtaacaaatgaaacaactgcaacgctcttattatttctggaaaacgtctcgcaaaaacaaaacaacatgcaaaaatccgctttcgttaattaatttttcggcgtaatnttcgcacatacattaatgagtaatatatgtaaggtggtggtaatggcgatgaatacggtttttcttcatttatcagaagaggcaattaaacggctgaacaagcttcggggctggcgtaaggtttcacgatctgcaattttacgcgaagcggtagagcaatatctggaacgtcagcaattcccggtgcgtaaagcaaagggaggcaggcaaaagggggaggtagttggtgttgatgatcagtgtaaggagcataaggaatgacaaaaatttntcattcttgaatataaaaaacagatgcccttattctggtattaatagaaggctgttttacttgaacttataataactgcaactgttacatcatatctggaaaacgcctcgcaaaaataaaaaatgatgcgtaaatgagctttctttaaagattcgacaagggtacttttctctccatagatatcaaatgatattggtcaaatatttatgaactctctggcaggtattgatatgggcagaattatactcgatttatcgaatgaggtgattaagcaacttgatgatcttgaggtgcagcgtaatcttcctcgtacggagctattacgggaagcggtagatcaatacttggtaaatcaatcgcaaacagtaagaaccagtgcttttggcatatggcaagggtgtgaggaagatggtgtcgaataccagcgtaagctgcgcgaggaatggtaatgggaaaaaatgatatcaatcagattgctgacaacgtgcgcgttgttcatgccggatgcggcgtgaacgccttacccggcctacaaagtcgtataaattcaatgtattgcagtttattggtaggcctaataagcgcggcgcatcaggcaatcttacgcttatcatcagtctcatacccataaccttattgatgtgggggtgggtaaattgaggcaaaacaggcactggcggcatagcttgaggtggtaacgcggaatacgagagatggtgtcgtcacaccctatgagctgtaatccgggcgaccagcgccacccggaaaacgtcagagattactccccttcacccggaaacaggaacgggttgatggaactgcgggcatagccttcttgctccattcgcgcgtccagtaccagagaggcgaggtcatctgccacggcttcaactttcggttctttttcctgatagagaattttcaggtaagtgccgcagtcatcgcagctttcggctttaatcgcggcctgttcgtcatccagcgaccagtaatgcagtttgccgctctgctcgcagttgctgcattttacgcgcacaacgtgccattcagtttcacacaggttgcagtgcaggtaacgtagcccctgagtggtgccaatttgcaccatgctggacaccggcatagaaccacaaaccgggcaatattgacgttgctcgccgtattcagcgcgggctttgccggggatcagattggccatctgcgcccagtagagcgacagtgcagcccagataaacggcgctttatcgctgctgacggacgagaaatcagaggcaaacagtgcgctggccatatcttccagctcctgagtcgatgccttctccagattctcaatcactgccagcgccgggccgctcatttcaggtttcagctcagcaatcagcgccatcagcagcttttgccagtgcttatcacgcggcagaacgtgaatatccagcgggggcttgccttgtgcgctggcttctttaatgcgcgcagtcagatccatctccagcggatggtcgtacagcaccacttcctgggcgtgggcgataagcgcagcaaagcgcaggtaatcacccagcggattattttctgccagctcgcgcagacgctcggcgcggcggttgtataaattcttgagccgagggaacaataacggcggaatcatatccgccgtacgtttctcgctcgaacccagctcatcttgcgggattatgcgaatactcattcagctttcttttccgttgtcttgcggacctcacggtaccagcgcgggtgatgtttcttcgcccaggcgctggtaacccatccttccaccatggcggtaatcgtgcctttcacccaaagggcggcgtagatatgcaccatgataaccacaattaacgccactgcggcaaatgaatgcagcattaacgcgaatcggatcaccgggattgagaaagcaggcgcaaaataaggacgccagataatcacgccgctcaccagcagcagaaccaggaaaataatcgccgcccagaaaacgcatttctgaccgaagttataacgcccggtgtcacctacttcctcgttgacgacgatcttacgaatattcttcgcccaaaagatatcatcccgattgattaggttgtgatgccagtaacggaaaaacatgatgatgaacgaggcaaacataaccacgccgacaaacgggtgcagaattcgcgccagctgcggtgtgcccatgatttgcatcaaccagttgaaggacgggaacaaaaagcccagcccgctcaccgccgccaggatgaagcagaaggcggtgatccagtggttgatacgttccggcgcggtgtagcgcacgatggtgtcacgtcgtttcatttgcgctcctcgtctttctcttcgtgcagattattctcttcctcatccgcatggttcggaccgacacccacgtagtggaagatactggctgcgaaggtagccgcaaagccaacagctgcgancggtttccagatgcctttccagaatttcacggtttcgctgatttccgggttctccggcaagccatgatacagatttggcttgtcagcatggtgcagcacgtacataacgtgtgtaccaccgacgcctgccggatcgtacaggcccgcattgtcgtaaccgcgggttttcagctccgccacgcgctcgctcgccagcgttttcatcgactctttcgtaccgaagtgaatcgcgcccgttgggcaggtcttcacgcaggctggttcttgcccaaccaccacgcggtcaacgcacagcgtacatttgtagacgcggttgtcttccgggttgaggcgcggaatgtcgaacggacagcccgcaatgcaataaccgcagccaatgcactgctcggactggaagtcgacgataccgttggcatactgaataattgcaccttccgccgggcacgctttcagacagcctggatcggaacagtgcatacagccgtctttgcggatcagccattccagtttgtcgttctgctccacttccgagaagcgcatcaccgtccacgatttggcgcttaaatcattggggttgtcgtacaccccaatgttattgccgacggtatcgcgaatgtcgttccactctgaacacgccacctgacaggctttacagccgatacaggtggtgacgtcgatgagtttcgccacttcttcctggaagtcccgcgcctgaggcgcgggggtcagaccgttagtcgcggaacgacgaatgatatcttgagattgataagccatatgtcgtctccgttacaccttttccacattcacaaggaaggacttaaactccggcgtctgcgtgttcgcatcaccgacgaatggcgtcaacgtattggcaataaagccttttttcgcaacaccttcatagccccagtgaataggaataccgatggtatcgatatctttgccgttcgctttcagcgtgcgaatacgtttggtcaccaccgctttggctttgatatagccacggttggaggagactttcacggtatcgccctgggcaatgccaagtttattcgccagcgactccccgatttccacaaactgctctggttgcaaaatcgcgttcaacagcgcgtgtttggtccagtagtggaagtgctcggtcagacgataggtggttccgacatacgggaacttatcggctttacccaatgcttcggcgtcgtctttaaagatacgtgcagccgggttcgagataacgtttggatgcagcgggttagttcccagcggcgtttcaaacggctcgtagtgttccgggaacggaccttccgccatcttatcgagggcaaacagacgccccatgccttcctgctgcatgataaacggcccgacgccgctacccggaggcgctgcgctgtagtccggaatatcccagccggtccacttagtgccgtcccatttcagcaactgacgcttcggatcccacgggttaccctgcggatctgcggaggcgcggttatacagaatgcggcggttaagcggccatgcccatgcccaacccagcgtgttaccgaggccagacggatcggcgttatcacggcgtgccatctggttgccttccggcgtccagctaccggcgaaaatccagcaaccacaggaagttgtaccgtcatcgcgcagttgggcaaacgagctaagttgttggcctttcttgacgataaccgcaccggttgccggatcggtaatatcggccagcgccttaccgttgctctccatcgctacttcttccgacttcggctcatgcggaatggcgtagttccaggtcatgttcagcacctggtccgggttcgcgccaccctgttcggcatacatcttgcgcaagcgcaggaagataccggagaggatctcgccatcagtcagcgcaatccccggggcgtccgcacctttccagtgccactgcaaccagcgacctgagttaacgattgaaccgttctcttctgcgaagcaggtcgatggcagacggaacacttcggtctggatcttcgacgagtcaacttcgttcagctcaccgtggttctgccagaagttagaggtttcagtgttcagcgggtcgatggtgacgaggaacttcagtttcgacagacaactgatcactttgtttttgttcgggaatgaggcaacagggttaaagccctggcagatatagccattgaccttgccttctttcatcatctcgaagtattgcaggacgtcgtagcctttatcccacttcggcaaccagtcaaagccccagctattttctgccgtcgctttatcaccaaagaaggccttcatcatagagacgaagaatttcgggtagttgccccagtagtttacctggccttccagcagcggttttggcgtgttggcggtaaggtaggtttgcagatcggtctgcttctcgcttggcagcgtcatgtaacctggcaggctctgcgacagcagccccaggtccgtcagcccctgaatattggagtgaccgcgcagggcgttaacgccgccgccagccatccccatgttaccgagcagcagctggatcatcgccatcgtacgaatgttttgcgcaccaacggagtgttgcgtccagccgagggcatacaggaacgaggcagttttatcgtgagcactggtttctgcgatgtattcgcagactttcangaacgcgtcttttggcgtaccacagatgttttcaaccacatctggcgtgtagcgggaaacgtgctgtttcagcaagttccacacgcagcgcggatgttgcagcgtggtatcgcgtttggcgaagccgttttcgtccagttcataagtccaggaggatttatcgtacttgcgtttttccgcgtcgtagccggtgaacaggccatcttcaaagccgtaatcctcacgcacgatcaggctggcgttggtataggcttcagtgtattcgcggttgaatttttcattgttcagcaggtacagcaatacgcctgacaggaaagcaatgtcagtaccggaacgaataggggcatagtagtcagccaccgcagccgtacgcgtaaagcgaggatcgatcacaatcagcttcgcgccattgtgaattttggcttccatcgcccagcggaacccgaccgggtgagcttcagcggcgttaccgcccatcaccacgacgaggttggcgttcttgatgtcgacccagtggttggtcatcgcaccgcgaccaaatgttggagcaagacttgctaccgttggtccgtgtcagacacgcgcctggttgtcgaccgcgagcatacccagcgcgcgggagaatttttgcgttaaatagccggtttcgttactcgacgcggaagcacacagcatcccggtggagagccagcggttaacagtcacgccttcggcgttttgcgcaatgtagttagcatcgcggtcttctttcatcagtttggcgatgcgatcaaacgcctcttcccaactgatttgctgccatttatcagaacctggcgcacggtattccggaaacttcagacggctttcggagtggatgaaatccaccaggccagcgcntttcggacaaagtgcaccgcggttgaccgggtgatccggatcgccttcgatatggaagatagatgctttggcgttttttgctccgtcaccgaggctgtacatcaacagcccacagcctacggaacaataggtgcaggtattacgggtttcgcgggtgcgcagcagtttatactgccgggtttccgcgagtgctacgctgggtgcaaaacccagtgccgctgccgtggtgcctgccataccgccagcgcagatcttaaagaactgccttctgctgacctgcatggattgctccttgtttcgacattgtcacgtcccatttacattcgcttgctgcgtgtgcagggagtgggagttatttttctttgcggaaggnnnnnnnaaggtccagaattggctcaatttccctccatccaggaagggtttgtaacagaataccataatgttggtgtgtgtgttcttatctggttaagagaaagtgaaaaaaacacagcaaaaagaaatcgaaaatgtgacaaatatcacaggtgttcgtcaaattgagttatggcggcgtgatgatttacaacacccacggttagatgaggtcgcggaagaagttcccgttgcgctggtctacaacggcatttcgcatgtggtgatgatggcgtcgcccaaagaccttgagtactttgcgctcggtttttcgctttccgaggggataatagaaagtccgcgcgatatcttcggcatggatgtcgttccttcctgtaatggtcttgaagtacaaattgagctttccagccgccgctttatggggttgaaggagcgccgccnnnnnnnnncgggacgtacgggctgtggcgtatgcggcgtggagcaacttaatgacatcggaaaaccggtgcagccgctaccgttcacccagacgtttgatctcaacaaactggatgatgcattacgtcatctcaacgattttcagccagtgggacaactgaccggttgtactcacgccgccgcctggatgttgccatctggcgaactggtcggcgggcatgaagacgtgggtcgccatgtggcgctggacaaactgttaggccgccggtcacaagaaggggaaagctggcagcaaggtgcggtactggtttccagtcgtgccagttatgaaatggtgcaaaagtcggcgatgtgcggcgtagagattttgtttgcggtgtctgccgcgaccacgcttgctgtagaagtggctgagcgctgtaatctgacactggtaggtttttgtaaaccgggtcgggcaacggtttatacccatccgcagcgtttgagcaattaattaaaataagtcctgcgatatatattaaattgcaggacttattcatttcgtgaattttattattttatnnntaaacaaaatgcgtgtagtggcgttttcttttttcatttattatgttcactctcttatctatatatttataaggcaattaaatgaaaaggaatttattatcttccgctattatagtcgccatcatggccctcggtctgacgggttgtgatgataaaaaagccgaaacagaaacgcccctgcctgccaatagtcaacctgccgcaccagctcctgaagcgaaacctactgaagctcccgttgcaaaagcagatgctaaacctgaaacacctgcgcaaccggtggtcgatgaacaagcggttttcgacgaaaaaatggatgtctatatcaagtgctacaacaagttacagatcccggtacagcgcagtctggcgcgttatgctgactggctgaaagattttaaacaggggcctaccggtaaagagagtactgtttatggcatctacggcattagtgaatccaacctcgctgagtgtgaaaaaggcgtaaaaagtgctgtggcgttaacgcctgcgctgcaaccaattgatggcgtggcggtgagttatatcgatgctgccgtggcgttgggtaataccattaacgaaatggataaatattacacccaggaaaattataaagacgatgcgtttgcgaaagggaaaacgctgcaccagacattcttaaaaaatctggaagcctttgaacctgtagcagaatcttatcatgcggcgattcaggaaattaatgataagcgccagcttgcggaactgaaaaatattgaagaaagagaagggaaaacattccactactattctctggcagtcatgatttcagcgaaacaaattaataacctgatatcgcaagagaagtttgatgttgatgcggcaatgaagaaagtgtctgaactggaaacgctggtggcgcaggccaaagaagcggataaaggcggcatgaatttctcgttcattaattcggcagaccagtatcaactcgagactaaaaaatatgttcgccgcgtcagagataaagtcccgtactctgactgggataaagagcatcttcaggatgcaaacacaagctggatggtcgaagactcatttccacgagcgttacgcgagtacaacgaaatggttgatgactataatagcctgcgttaaacgtttttgatgataaatgcagtgtcggatgcggcgcatccgacacagttcaccccttgtgaagtaactccataaatgcctcatatcctgttaacccggcaataacttctgccggatgctgacacaatacgcttgccagatagctaaatatttttagctcatgacgcgcatcggcggcggcgcaggcgatcaagacatggttaatgacttcgttattcacctcaactggttgggcgagggtaataaaaaatccacgaaaacgtcgctcctgttcgctccagcaatgtgggatggcgaggcgattaacaatcaggttttcaccttcgccttcgcgggcgatgatccgttgcgcttcatcggcggtaatatggtgttgtgcgactaattgcgcacaaatttgccgggtaatatgttgccagctttcaccgcgtacattcgaataatgaaaacttccgggggcagagaaaaaacgctccggttgctggcgaataaatgccgtcgccagaaaatgttttatttgttcgataccggcagccgtaatgatattttttacggtgatgtaattatttaccgcgtcatccagtaaataatggctgttgttaatgatcaataacggctcaatctcttcgcgaatggcaacaagttcgcttaagctacgggcaataatcacccgacaatgtaaaacatcgcgctcaatggcgagctgattaatagtggcaatcgcgttctggtccgagagcaaaatgatcggctggcgttcgttttgatgtcgttccagcgcacaggcaaaatacaaaccgatcagatcgctgtcgaaaaggggaatatcgagctgttcacgcagtagcgtaataaagtgcagactcatatcaaaggccgcaggccaggcggctttcaggttattcatgctgctttggcgatgctcagcaatccacactggtgcggcaaggcaacgtaataaatgaccggtaatgttctcaaccagctgcgtatcaataatattcaatgacgcgagacctggcaccctttgcagcaaccccagcacatgatcggcagaaattacctgcgcttgctgatgctgtttctctatcaaacctgtcagggttcttacagcgttatcaccaagaaacagaccgctatgttcaacgatttgttttatctcgtcaccgggatattgcggccactcatcggtcagttgattacgcagggcgtaaatcgccagaatcaggctggagagataatccccctgcatgagcggccagcggtgttggttgtcgcaggccgtggataaatgctgaaggttgtctcgtgttacgccagccaaaggtattaaaaacggatctttgcgtagcaagttcgccagcaagataacgcgtttctcttctgtttcatcaatgaaatggcccaaaccgggacgactggccaggcaacaagtgcgttcataacgctgttttaaccggggcagacgctctgcgacccaagtttctggcaaattaagcgccgaggcgagttgcgcacggggagtaaaggtattcagtaataacagcgccagcagccgatcgtcgttatcgtgcttttgcagcaactgaaaaaagctgcggcgctcgaagatttccaactgatagcccgcactgccactggcagagatacgagctttgccgttaagggtaaagttgagatagtcaatatcacgcaggatggtcctgcctgaaacgccagtctgttgcgccagctcgccaggcgtgcgcggctgttgctccagcagatcgacaatctttaactggcgttcgtttagcattaatccacctgacggaactggctaaacgcgttgactttctccgcagttaaggtcgtcagaaaatcccgtatcagcgtgagcagagcatcataatcggcttttgaaatcataccgctgttagcgtgcagataacgagttggcagacacagcgcgacaaccggacgccctccgcccattacgttgtagcgcccgccatccgtcgctccggttttcatggtggaaaattgcagcggtaaaccgttatgtgcggcacagttttttaacgccgccaccagtttctggttgggtaagtagcgcttgtcaaacagcatcagccccggcccgttgcccagtttcagcgggtatttaatgttatcaatgcccggaacatcgcccgcgacggcggtatccagcacgatcaccacatccggtttagtgtgttcagccgaggtttgtgccccgcgtagcccaanttcttcttccacgctgccgacgccgtacagcgtaattcctgggttatttactgtctgtagtagctcagccatcatcgcgcagccgatgcgattatccagcgccttgccgactattttatcttcgccccagcaggcaaaattggcttccgggctaataaaatcgccaatttccgcaccgcgttttttcgcttcttcgcgactgttcgcgccaatatcaatgaacatctcatcaaatgacagcggttgttgcttttncttttccgttaacgcatgaggcgctacggaaccaatcacaccagggattttcactcccttgtgtgtgcgtattgttacccggtggttgagcatcgactgattccaccagccgccaatggtggtaaagcgcagaaaaccgctctcgtcgatgtgggtgaccataaagccgacttcatccatatgcccgacaacggcaacttttggacctttatttcccttacgggcaacaaagctgcccagaccatcaaaggcgatctcattaacgcaaggttccagcgtgtttatcagaatgtcgcgaacttcctgttcatcgcctctgacggcgctggcttcgcacaactgttgcagtaactcaatgttcatggacaagctcctgttgcgcggctttcgctttgcggcgtaaccacaatcctttcaggacgataatgaatgaaatgttcagcgcgaggccaatcgccagcaccagataaaacgaacctaccggcgacatcaggccgatcagcgggtcaaagatacccaaaccaggtgccagacgtttgattccgaaagcgatcaccagcacgccggtaatgccgcccgccagcgtattggcggtaatcatcggcaacggagccgccagagcgtaaggaatagccggttcggttgcgactgtggcaccgaccacaatggcactactggcagcctctttttcctgtcgggtaaacagtttgggcgcaatgaacgtcgcaagacccgccgcgacgnnnncaacgccgacgatggcgtaccagtcataaatgtgtttttccagcagtgagaagcagaagaaccaggcggttttattgatggggccgcccatatcgaacgccagcatcgcaccgaccagaaacgctgccgcaaacttcattgatggaggaatggtattcaggaagtgcagtagcccgcccatgaggtcggacatcaccggcccgataacgtagtaagtgagcacgccaaaaaccagcagagtaacgaatgggataagcatggagccgagcagcggttgtaatgctttgccaagacggactttacggaaccagaagacgaaatagccaatcgccagccccagcaccaccgcgccgaggaatcccgcacccgactgggtgccgagcagcgctttgtcgttcgccagatagcaaaccagaaacgccggagcgaaagccggtttatcggcaatcgacgaggcaatataagcgcccatgatggggatcataaaggtgaagccaaggtaaccgatggattcaactacccaggtaaacgacggcgcgcctttcgacatatcggtatacggcaaaccgaactgcaccagcatgttggcaagcgccaccaggataccaccgccgatgacaaacggcagcgccgcagagacgcccgccatcaggtggctcatcacgctgccgctttgtacttcctgtttgcctagcttcacgccgctatctgcggcaaaaagctgcgaatttgtcggtaattcactgaaaatctgatcgatatttttcagcgcctgggagatggcaatctcataaacttttttcccggcaaaccgtgcgcgatcgtcaccgctcaggccacgcccggtggcgagaatcacgtaatcggcagcggcaatctcttcgctggataagcggttttcaacgccgctggacccttgagtttccactttaatggtatggccgagagaacgggctttctgttccagggcttccgccaccatgtaggtgtgagcgatcccggcggggcagttggtgatcgcgacaatacgtaaggatgactccatcgccacttccttatgagctgagggtttgatttaacaaggcaagcacctggtcggtatcgccctgttgcagttgatgaataaattcctggtgaataattttgcgacacagtgtgccgatgattttgacctgatcctcttcgccactttgcggtacgccgaggcagatccagcaattgacgtcttcgccgtcgctggctttccagtcaatagcctgcgctttgcgggcgaataacacgaacggttgtttaacgcaggcgcttttaccgtgyggcacggcgacaccagaaccaaaaccggtggagtgcattttttcgcgcagcagcagggtttgcaggaactggtgtgagtcggtgataaaaccgttttgtaacgccattgtcgccaactgcttcagaacggaataagcgccattgccctgaatattcaggtcaatacagcttgcagtaagagctgccattaatcggactccatgaaaaaatatttcagttaattgtaatagcggggcgggtttgtgatgagcgcggatatgtcgtgaagtcgtgacaatataaagcagagtgaaggataaattttgcggcgtaaggcacatattagtaggtaaaataaatcttgtgaataaagagttattatttaatgattttgtgaatgtttaaatgtctcagataatttgtctaaacgttatttatatttgtggcttatgagccagcttgaatcatatctaatattttttacgatntttagttaaaaacggcactattgttatattcctcacgttccaggaaatcagcggatttactcatattatgcggcgggatactatccatcggcctgctgaagttggattaaaaattcgaaagtgcacaccttatatttctctatatacgtattccttttggaaagcgtagggtctcctttatttcagggaacgtaaataatgaaaaaatcgacattatctttagccatcggtttattattggcatgtagtaccggtatggcaaaaacacagcatttaacgctggaacaacgcatggcattgctggaagaacgcctggaagcggcagaaatgcgggcggcaaaagcagagagccaggttaaacagctgcagacacaacaagccgctgagatccgcgaaattaaggccgctcagggcaatacgccggtaaatggacaggcaacggcggaatctgcaaagaaaaatgccacctcacctaatcttttgctttcaggttatggcgatttaaaaatctacggcgacgtagaatttaatatggatgcggaaagtaatcatggcctgctggcaatgaccaacgctgatgtgaatagcgatcccactaatgaacagtggaatctcaatggtcgtattctgttaggttttgacggtatgcgaaagatggacaacggttatttcgccgggttctccgcacaaccgctgggtgatatgcacggttcagtaaatatcgatgatgcggtattcttctttggcaaagaaaacgactggaaggtcaaagtaggccgttttgaagcctacgatatgttcccattgaatcaggatacctttgttgaacattccggtaatactgcgaacgatctttatgacgatggcagcggttatatctatatgatgaaagagggccgcgggcgctctaacgctggcggtaatttcctcgtcagcaaacaactcgataactggtattttgaattaaacacgttacttgaagacggaacatctttatataatgacggtaattatcatggacgcgatatggagcagcagaaaaatgttgcttatctgcgcccagtaattgcctggtcgccgacggaagaattcaccgtttccgcagcgatggaagcgaacgtggtaaataatgcttatggttataccgatagcaagggtaattttgtcgatcagtccgatcgtaccggctatggtatgagcatgacctggaacggcctgaaaacggatccggacaatggcattgtggttaatctaaataccgcctatttagatgctaataatgagaaagatttcactgccgggattaacgcgctgtggaaacgtttcgagctcggttatatctacgcgcacaataagattgatgaattcagcggtgtagtttgtgataacgactgctggattgatgatgaagggacgtacaccattcacaccattcatgcgtcttatcagttcgctaacgtgatggatatggagaactttaatatttacctcgggacgtattactccattctggatagcgacggcgataaaaaacacggtgatgatactgatgaccgttacggcgcacgcgttcgctttaaatacttcttctgatgaagtcgcggtgctggatattttccggcaccgcaactcattaaggcaggtaaaacacttcttgcagctcgttactcaccgggctgttatccgggttagcgggcataacatcggtcatatatttccaccaacgttggcagatttcagtgctggctaccgcattccaccgttcttcagattcaatctttaccgtggcaaacagcagattacgcgctttgtcgaggtaaatggcgtagttatgcgcaccgtgagatttcaacactgcttccagttccggccagatgggattatgccgacgctgatactcttcgtgggcgtcggggtttacctgcatgacaaaggctttgcggatcatgtttgctccttacagcgccagcgcactggcgagtggtgtaacgccgaaacgctggccgagcgctatcaactcttcacggctgatagtctgtttcatgccgcccatcgaatacaccttcactaacacttccgctgatttttctgcggtgtcgattaaaccgaaggtttcatccagcgtcggtccggaaccgaacacaccgtggaagggccacaacaccagcgaatgtttttgcatctcttgggcagttgcctggccgatttcgtccgtgccgggtaccatccacggcagaatgccaacgccatccgggaataccaccagacactcggtgctgccttcccacagttggcgagtgaagaccgcggtgtcgttttcaagtacataggtgagggcgatcaggttggtggcgtggcagtgcatgatcacccgatctttaccgttggtggctttaatgcgctcgcagtgggagagaaagtgagccggaagttcagaagttggaacggcttcgttggttaacccccagagaatatggtagcccgcgccatcgctgtcgacttttacgacgcctaagttagctgcaggatcgagctggacgttacggaagaatttgccggagccggtgacaataaacggcgtatttgccagtaaaggcatgggttggctgagcggaatatagcgcggttgtgggtggaagttgtcgtgataaagcgcgatatcggcgtcatcctggcgcagcgtcaggttgccgccgttgcgctcgtcccagcctttcagccaggcatcggtggtggctttgatcattccctggacaaaccaggactgggtaatgttttgcatgttctgtgttcctgtaaattcggtgttgtcagatgcacgacccgtaggccggataaggcgctcgtgccgcatccggcaatcaatgcctgatgcgacgctgtcgcgtcttatcaggcctacaactattgccggcctgtaggccggataaggcacttgtgccgcatccggcaatcaatgnnnnnngcgacgctgtcgcgtcttatcagacctacaactattgccgacctgtaggccggataaggcnnnnnnnnnnnnnnnnnnnnnnnnnnnnnnnnnnnnnnnnnnnnnnnnttatcaggcctacaactattgccgacctgtaggccggataaggcgctcgtgccgcatccggcaatcaatgcctgatgcgacgctgtcgcgtcttatcaggcctacaactgttgccgacctgtaggccggataaggcacttgtgccgcatccggcagtgtttacccgcggcgactcaaagtttctttctcatatgcccgcacgctctccagccattcgctacctgctggcgtatcgtgacgttggcaatacatttcccagaccgcctgccacggcaacgatttctgctcttccagcagtgccagacgcgcagtgtaatcgcccgccgcttccagcttgcgcagctcagcggtaggttccagcaacgcacgcagcagggcttttttcatattgcgtgtaccaatgatccacgcagcaatacggttnngatagaggcatcaaagaagtcgaggccgatatgcacccggtcaaacagatcgtgacgaacaatctcactggcaatcgcctgggtttcatcatccagcagcactacgtgatcgctgtcccagcgaaccggacggctgacgtgcagcagcaactgcggcacatacagcatggcggcggaaatcttgtcggaaatcacttcagtcgggtggaaatgcccggcgtccaggcacagcgcagtctggcggctggtggcataccccatgtaaaactcattggagccaaccgtgtagctctctgcgccaatgccaaacaatttgctctcaacggcgtcgatatggtgcgccggatccagcttctcgctgatcacctcatccagagctgccagcagacgctggcgcggagcgagacggtcaacggtgatatctttcatgccatccgggatccagatgttcatcaccgacggtgtgccgagttgctcaccaaaataggccgaaacgcggcggctggccttgcagtgatcaatccagaactggcgaatgctgtngtcggcatgggaaagcgtaaagccatcggcgcttagcggatgcgagaaacaggaggggttaaaatccagaccgagctgattggctttcgcccattcaacccagtttttgaagtgctcaggtttgatctggtcgcgcgagactggcgtgtctgattccagatagatggcatgtaaattaagccgttttggccccggaatcagccgcatagcctgttccagatcggcacgtagctcactggcattacgcgctttgcccggataattgccagtagcctgaatccctccggtcagcgaaccttccgggttttcaaaaccggaaacatcatcaccctgccagcagtgcattgaaacgggtaaacgatcaagttggcgcagcgcctcctcgacatcaatccctactgccgcgaaacgctgtttcgccagctcccaggcctgttccagttgagtggtcatgcgcaaagctcctttgtctgtcgtgtagagtgaatccgcgccacatagtgggcaatttcactgtcaggattaggggtaaaggtggtcagattcgcggtggtgctgacgacctgacggaaatcatccacattgttgagttcatccagcgtcattaactggatgccgatattgccgagcgtcgaggcttcaacaggcccggcgatcacccgaataccgcaggcatcggcgcatagctggttgagcagcgtgttctggcagcctccgccgacaatatgcagttgcgagaaatcttcaccgcgcagctgcgccagctcatgcaacacatcggcatacagcagcgccagactgtcgaaaatgcagcgcgccagttcagcatcactttccgggatcggttgcgccgtttcccgacacgcagcctgaatttcgctgcacatcgtctcaggattaataaagcgatngtcattgggattgataatgaagcggcaagccggaagtgcctgtgtcgcggagataagcgccggaagatcgttgatttgccgctcctgaagcactcgctgaagcagccataagcccataatatttttcagcacccgatagcgaccttccgccccgccttcattggtgatgttggctgccagtgccgtgtcattggtaaatggcgtctggctttcgaagcccatcaatgaccaggtgccagaagagagataagcagcacgtgaaccgtttaacggcgaggcgataaccgcgctggcggtatcatggctggcaacggcgaccactggaatctcattaccctgcgggcaaatccagtgacctatgacattacccggatgcgtcgggcgaccaaaccaggctttgttggccccgctccacgccagtagcgactcgtcccagtcgtcgctattgatattgaccagttgcgtggtcgtggcgttggtatattcccagttcatcttgccggtcaggcgataactgaagtaatccggcatcagcagagcgtgagcaatgtgtggaataagttcaggttgttgctccgtcagcgcacgcaactgataaagcgtattgaagggcagaaactggatgccgctacgttgataaatatcgcgtttgccgagttgttgttgtgcctgcgccattaggccattggtgcggctatcgcgataagcaacgggcaggcccacacgctgaccctgttggtcgagcagcacaaagtccacgccccaggtatcaatcccaatgctatcgatacgaatcccttcctcgcacaccttgtttaatccaaggcgaatggcactttcaaggctatccacatcccaggtgacatagccgttctgactatgcagcccattgttaaaacgatggatttcgcgcagcgtcaggctgcggcattcacgctcgtaacgcgccagcatcacgcgcccactggatgcgccgagatcgacggcgacacaattgcgaaaggtcataatgtgatcctgctgaatttcattacgaccagtctaaaaagcgcctgaattcgcgaccttctcgttactgacaggaaaatgggccattggcaaccagggaaagatgaacgtgatgatgttcacaatttgctgaattgtggtgatgtgatgctcaccgcatttcctgaaaattcacgctgtatcttgaaaaatcgacgttttttacgtggttttccgtcgaaaatttaaggtaagaacctgacctcgtgattactatttcgccgtgttgacgacatcaggaggccagtatgaccgtattacatagtgtggatttttttccgtctggtaacgcgtccgtggcgatagaaccccggctcccgcaggcggattttcctgaacatcatcatgattttcatgaaattgtgattgtcgaacatggcacgggtattcatgtgtttaatgggcagccctataccatcaccggtggcacggtctgttttgtgcgcgaccatgatcggcatctgtatgaacataccgataatctgtgtctgactaatgtgctgtatcgctcgccggatcgatttcagtttctcgccgggctgaatcagttgctgccacaagagctggatgggcagtatccgtctcactggcgcgttaaccacagcgtattgcagcaggtgcgacagctggttgcacagatggaacagcaggaaggggaaaatgatttaccctcgaccgccagtcgcgagatcttgtttatgcaattactgctcttgctgcgtaaaagcagtttgcaggagaacctggaaaacagcgcatcacgtctcaacttgcttctggcctggctggaggaccattttgccgatgaggtgaattgggatgccgtggcggatcaattttctctttcactgcgtacgctacatcggcagcttaagcagcaaacgggactgacgcctcagcgatacctgaatcgcctgcgactgatgaaagcccgacatctgctacgtcacagcgaggccagcgttactgacatcgcctatcattgcggattcagcgacagtaaccacttttcgacgctttttcgccgagagtttaactggtcaccgcgtgatattcgtcagggacgggatggctttctgcaataacgcgaatcttctcaacgtatttgtacgccatattgcgaataatcaatttcgttctctggccgaggtagccacggtggcgcatcagttaaaacttctcaaagatgatttttttgccagcgaccagcaggcagtcgctgtggctgaccgttatccgcaagatgtctttgctgaacatacacatgatttttgtgagctggtgattgtctggcgcggtaatggtctgcatgtactcaacgatcgcccttatcgcattacccgtggcgatctcttttacattcatgctgacgataaacactcctacgcttccgttaacgatctggttttgcagaatattatttattgcccggagcggctgaagctgaatcttgactggcagggggcgattccgggatttagcgccagcgcagggcaaccacactggcgcttaggtagcatggggatggcacaggcgcggcaggttatcggtcagcttgagcatgaaagtagtcagcatgtgccgtttgctaacgaaatggcagagttgctgttcgggcagttggtgatgttgctgaatcgccatcgttacaccagtgattcgttgccgccaacatccagcgaaacgttgctggataagctgattacccggttggcggctagcctgaaaagtccctttgcgctggataaattttgtgatgaggcatcgtgcagtgagcgcgttttgcgtcagcaatttcgccagcagactggaatgaccatcaatcaatatctgcggcaggtcagagtgtgtcatgcgcaatatcttctccagcatagccgcctgttaatcagtgatatttcgaccgaatgtggctttgaagatagtaactatttttcggtggtgtttacccgggaaaccgggatgacgcccagccagtggcgtcatctcaattcgcagaaagattaattcgccatgcccatgccaacgatgttggcggcaacaataatcaccacacaaccgaggctcaacaccgttaccggacggcgtcctgcattgttccactctttcagcaccagcccgacgataccgccgcacaatacatagaaactcatatgcagcatccaactgatgtagtcatactgcgccggaatgcgggcgtggccccaggcatagaaaaagaattgcagataccacatcaacccgcccagtgctgagagtaacacattgtgaatgatcagcggttttgccagcgagaagtcggcttttagcgataaatccttcacttttgccagacgaataaaacagaaaccgaggttgatgatcgcgccgccgcccatgatgacaacatagcttggcagagcgacatacagtggatcgacgcctagtgtggcagcggcttcatgcatcggttttgcggcgttcatcgcaaaggacatcccggcagagaaaatgccgcacatcaccgccagcaccagtccttttttcagattgaactcttcggctttaatgcccatcttgcgctctttcaactgcccggctcgagttacaatccctacgccaatcagcgccaccagaacgccgagcaacgtcatgcgtccgccttcggtgttaatcaacacatcgaaattgccgttgataattggcgtcatcagcgtaccgacaatcaacgtaatgccaatggcgatgccaattcccatcgacatgccgagataacgcatggtcaggccgtagttgatattaccgatcccccacatagcgccgaacagaaaaacaggcagcagcgtagagagactaaacgagctgtaatacgcccagaaattcggtagtaacagggcgctgatggcctacggcagaataatccacgaaacaatcccaccgactgaccacatggtttcccatgaccatttttttacttttttgaacggagcgtaaaaacaggctgcactggccgcgccgatcaaatgccaaaatatccccatcgtaatcgcgttactcatcttcttatcctcatcatttttcgtcgcgtcacatctccgacgagatgagtgtaaaaatcgtgctgtcgattaacctttcgcctgttgccgccgttgtcgatttactggcaatcacggcattaagtgggtgatttgcttcacatctcgggcattttcctgcaaaaccatacccttacgaaaagtacggcattgataatcattttcaatatcatttaattaactataatgaaccaactgcttacgcggcattaacaatcggccgcccgacaatactggagatgaatatgagctataccctgccatccctgccgtatgcttacgatgccctggaaccgcacttcgataagcagaccatggaaatccaccacaccaaacaccatcagacctacgtcaacaacgccaacgcggcgttggaaagcctgccagaatttgccaacctgccggttgaagagttgatcaccaaactggaccagctgccagcagacaagaaaaccgtactgcgcaacaacgctggcggtcacgctaaccacagcctgttctggaaaggtctgaaaaaaggcaccaccctgcagggtgacctgaaagcggctatcgaacgtgatttcggttccgtagataacttcaaagcagaatttgagaaagcggcagcttcccgctttggttccggctgggcatggctggtgctgaaaggcgataaactggcggtggtttctactgctaaccaggactccccgctgatgggtgaagctatttctggcgcatccggcttcccgattctgggcctggatgtgtgggaacatgcttactacctgaaattccagaaccgccgcccggactacatcaaagagttctggaacgtggtgaactgggacgaagcagcggcacgtttcgcggcgaaaaaataatcatttgccgtctgctgcagtgaggcgtttacgccgcatatcagcttaaaaaatgaaccatcgccaatggcggtggtttttttgtgatcaatttcaaaataaaaacaatgatccgataaaaataaaacagcgtttcagttgatgtggttttgatcacttttattgattaaatgaatgtctatcttcgtttccatcaacactgatgctccattgaggaattacgcatcagcccttaaaaatatgccgacaggtgatggaaatgcagataaaacgcttgattgagaaaatcccgggggggatgatgctcgtcccgctattccttggcgcactgtgccacaccttctcgccgggggcggggaaatattttggatcattcaccaacgggatgattaccggtacggtgcccattctggcggtgtggtttttttgcatgggggcgtcaataaaattaagcgcgacgggaacggtactgcgtaaatccggtacgctggtggtaactaaaattgccgtcgcgtgggtggttgcggcaattgcctcgcgcattattccggaacatggtgttgaagttggattctttgccggactttcaacgctggcgctggtggcggcgatggatatgaccaacggcggactttacgcttccatcatgcagcagtacggcacaaaagaagaagctggggcatttgtgttgatgtcgttggagtccgggccgctcatgacgatgattattctgggcactgccgggattgcctcgtttgaaccgcatgttttcgtcggcgcagtattaccgttcctggtgggctttgcccttgggaaccttgaccctgaattacgagaatttttcagcaaagcggtgcagacgctgattccattctttgccttcgcactaggcaataccattgatttgactgtaattgcccagacaggtttgctggggatcctgttgggtgtggcagtaattatcgtgaccggtattccgttgattatcgccgataaattgattggcggtggcgatggcactgccggaattgccgcttccagttccgcaggggccgcggtagcgacacctgtgctgattgcagaaatggtgcctgcgtttaaaccgatggctccggcagcaacttcgctggtagcgacggcagtcattgtgacttcgattctggtgccaattcttacctctatctggtcacgtaaagtcaaagccagagcggcgaaaatcgaaattttaggtacggtgaaataaacctgcttccttaatccccacagccggatgaactaacgttcgtccggtttgctattgagttcctgcctggatacttaccgcgaaaacagcacgcctgacataaaataaatatggtctaatggggaaatttctcgtggagagggaacagatgcgatatccggttgatgtatacacaggcaagattcaggcttatcccgaaggcaaacccagcgcaattgccaaaatccaggttgatggtgagttgatgctgacggagctggggctggaaggtgacgagcaggcggagaaaaaggttcacggcggaccagacagagcgctgtgtcattatcctcgtgagcattatctctactgggcgcgggaatttccggaacaggcggagttgtttgttgcgcctgcgtttggcgaaaatctctcaaccgacggtctcacggaaagtaatgtttatattggcgatattttccgctggggagaggcattaattcaggtcagccagccgcgctcgccttgctataaactcaattaccattttgatatcagcgatatagcgcagttgatgcaaaacacgggtaaagtgggatggttgtatagcgtgatagcgccagggaaagtgtctgcggacgcgccgctggagttggtttcccgtgtcagcgatgtgaccgtgcaggaggctgctgccatcgcatggcatatgccgtttgatgacgatcagtatcaccgtttactctccgctgccgggttatcgaaaagctggacgcgaacgatgcaaaagcgccgactgagcggcaagatcgaagatttttcccgccggttgtggggaaaataacccccggagtgtaggcctgataagacgctatcagcgtcgcatcaggcatcctgctcaaatgccggatgcggcgtaaacgccttatcctgcctacaaatgcggagtttaactccgcttatacagcggcaaccaaatcaccagccgtaaaccgcccagcgggctgtcttctgctttcacccagccacgatgctgctgaatggcggtttcaacaatcgccagtcccaaacctgtaccgccagattcacgatcgcgcgcttcatcggtccgatagaacggacggaaaatctgttcgcgatcttccgggctaacgccaggaccatcgtcgtccaccgtaatggtgataccgtctttatctaccgcaaagcccacttcaatcttcgtatgggaataacgcagggcattacgaacaatgttttccagcgcactctccagggcgttcgggttgccgtacagcggccacggcccaggcgggaagttaactgtcaacgacttgcccatttgctcggcttcgaacgccgcgttatccagcacttcactccacaactgattggctttgatggtctcgctaaccagcgcgtttttttgctgattacgtgacatcaccaacaggtcgttaatcatgctgtccagacgttgcgcttcggtttcaatacgctccagttccttgctttcaccantacgacggcgcagtaacgccgtacccagttgcagacgcgtcagcggggtgcgcagctcgtgagagatatcagaaagcagacgctgctgagaggtcatcatgcgctccagcgcggtgaccatctggttaaaactggcacctgcggcaaggaattcctgtggccccgcttccagttccgggtgctggcgtaagtttccctgggcaacttcatcggcagcgtttttcagcttacgcgccggttttgccagactccaggccaaccacaacagcagcggcgtactgaccaacatggtgacaatcagcagtaatagcgggcggtcaaacagtaagttaatgaaatcggattgagaactgctggccggacgaatcagataaagttggtaattatcttcgccatcacgcacggagaacggaccgaccagttccacgcggccatactttttcttctgcggatgatcggcgttatcggcctgaccaataaagttacgaatgatctgcatttcgctgcgttcagcgccgatcacgcggccttcggtggtcaccaataacaaacgctgtcctggcggtgcccacttatcaatcgcccggaacagacgccgccaccacattaaatcgttgggcggatcgttcgccagctccgcttcaacatgctgctcaatcatcagaccctgacgctgttcgctatccagaagctcggtcatctggcgtgaatcgagcttgggtaacatcaaaaccaacatcaacaccagcgccagcgtcagccagaagatggcgaagatgcgcgcggttaagctgcctatcatgaagcagaaaccatcaggtagccgcgaccacgcaaggttttaaaccacgggtgaccatctttacgatccggcagtttacgacgcaggttggaaatgtgcatatcgatagcgcggtcgaaaggcgtcaggcgtttgcccagcacttcctggcttaaatgttcacgggaaaccacctgacccagatgctgtgccagcaaatagagcagggtaaactcagtaccggttaactccagcgtttgcccgtcgaagctggcttcctgacggcctggattcagtactaaggcatcaacttccagtgtcggtgaaccgttgtcgttgttttgctgttgctcgctccagtgcgaacggcgcaggatcgcgcgaatacgtgccaccagctcacgatcattaaacggtttcgggagatagtcatctgcgcccagctcaaggccgagaacgcgatcaagttcactgccgcgcgccgtcaacataatgacaggcgtctggtgtgtctggcgaagtgcttttaatgtgtcgataccatttttcttcggcatcattacgtcaagcaaaagtaaatcaatgctgtcgtccagaagatcaagcgcctgttccccatcgtgggcaacaatcacgttgaagccttccatctcgagcagctcctttaatagggaagtcagctctcggtcatcatcaactaacaggattttattcattgtttaaatacctccgaggcagaaattacgtcatcagacgtcgctaatccatgactttacgttgttttacaccccctgacgcatgtttgcagcctgaatcgtaaactctctatcgttgaatcgcgacagaaagattttgggagcaaatgatgcgcatagttaccgctgccgtcatggcctcaacgctggcagtcagttcattaagccacgctgctgaagtcggttcaggcgataactggcatccgggtgaagaacttacgcagcgcagtacgcagagccatatgttcgacggcataagtttaaccgaacatcagcgtcagcagatgcgagatcttatgcaacaggcccggcacgaacagcctcctgttaatgttagcgaactggagacaatgcatcgccttgtcaccgcagaaaattttgatgaaaacgctgtgcgcgcacaggcagaaaaaatggcgaatgagcaaattgctcgtcaggttgagatggcaaaagtccgcaaccaaatgtatcgcctgttaacgccggagcagcaagcggttttaaacgagaaacatcaacaacgaatggagcagttgcgtgacgtgacgcaatggcaaaaaagttcatcgttgaagctattgagtagtagcaactcacgttcccagtagtaaaccctgttttccttgccatagacaccatccctgtcttcccccacatgatgtgggggttttttttatcctcaatttgcctgctgcttaatgcattgcagatgatttgcttccgttatactagcgtcagttgatagcgggagtatttatgaatcaatcttatggacggctggtcagtcgggcggcgattgctgcgacggcgatggcttcactgctattgctgattaaaatntttgcatggtggtataccgggtcggtgagtattctcgccgcgctggtggattcgctggtggatatcggcgcgtcgttgacgaatttattggtggtgcgatattccctgcaacctgccgacgataatcactcgtttggtcacggtaaagctgagtccctcgcggcgctggcgcaaagtatgtttatctccggttcggcactattcctgtttttgacaggcattcaacatctgatatctccaacaccgatgacagatccaggcgtcggggttatcgtgacaattgtggcgctaatttgtacgattatccttgtctcgtttcagcgttgggtggtgcgccggacgcaaagccaggcggtgcgggctgatatgctacattaccagtctgatgttatgatgaacggcgcaattctgctggcgctggggttgtcctggtacggctggcatcgcgccgatgctctgtttgcattgggaatcggcatctatattttatatagcgcgttacgcatgggatatgaggcggtacagtcattactggatcgcgcattacctgatgaggaacggcaagaaattattgatatcgtgacttcctggccgggtgttagcggcgctcacgatcttcgcacgcggcagtcagggccgacccgctttattcagattcatttggaaatggaagactctctgcctttggttcaggcacatatggtggcggatcaggtagagcaggctattttacggcgttttccgggatcggatgtgattatccatcaggacccctgttccgtcgtacccagggagggtaaacggtctatgctttcataatcagtataaaagagagccagacccgcattttgtgtataaaataccgccatttggcctgacctgaatcaattcagcaggaagtgattgttatactatttgcacattcgttggatcacttcgatgtgcaagaagacttccggcaacagattttattttgcattccaaagttcagaggtagtcatgattaagaaaatcggtgtgttgacaagcggcggtgatgcgccaggcatgaacgccgcaattcgcggggttgttcgttctgcgctgacagaaggtctggaagtaatgggcatttatgacggctatctgggtctgtatgaagaccgtatggtacagctagaccgttacagcgtttctgacatgatcaaccgtggcggtacgttcctcggttctgcgcgtttcccggaattccgcgacgagaacatccgcgccgtggctatcgaaaacctgaaaaaacgtgggatcgatgcgctggtggttatcggcggtgacggttcctacatgggtgcaatgcgtctgaccgaaatgggcttcccgtgcatcggcctgccgggcactatcgacaacgacatcaaaggcactgactacactatcggtttcttcactgcgctgagcaccgttgtagaagcgatcgaccgtctgcgtgacacctcttcttctcaccagcgtatttccgtggtggaagtgatgggccgttattgtggcgatctgacgctggctgcggccattgccggtggctgtgaattcgttgtggttccggaagttgaattcagccgtgaagacctggtaaacgaaatcaaagcgggtatcgcgaaaggtaaaaaacacgcgatcgtggcgattaccgaacatatgtgtgatgttgacgaactggcgcatttcatcgagaaagaaaccggtcgtgaaacccgcgcaactgtgctgggccacatccagcgcggtggttctccggtgccttacgaccgtattctggcttcccgtatgggcgcttacgctatcgatctgctgctggcaggttacggcggtcgttgcgtaggtatacagaacgaacagctggttcaccacgacatcatcgacgctatcgaaaacatgaagcgtccgttcaaaggcgactggctggactgcgcgaaaaaactgtactaatgatttcggaaaaaggcagattcctttagcctgaaaccgatgacagaagcaaaaatgcctgatgcgcttcgcttatcaggcctacgtgaattctacaatttattgaatttacaaacttttgtaggccggataaggcgttcgcgccgcatccggcatcgataaagcgcactttgtcagcaatatgaggcggatttcttccgcctttttaacccccaacatatacccgcaagttatagccaatctttttttattctttaatgtttggttaaccttctggcacgctttgctcatcacaacacaacataagagagtcgggcgatgaacaagtggggcgtagggttaacatttttgctggcggcaaccagcgttatggcaaaggatattcagcttcttaacgtttcatatgatccaacgcgcgaattgtacgaacagtacaacaaggcattcagcgcccactggaaacagcaaactggcgataacgtggtgattcgtcagtcacacggtggttcaggcaaacaagcaacgtcggtaatcaacggtattgaagctgatgttgtcacgctggctctggcctatgacgtggacgcgattgcggaacgcgggcggattgataaagagtggatcaaacgtctgccggataactccgcaccgtacacttccaccattgttttcctggtacgtaagggaaatccgaagcagatccatgactggaacgatctgattaaactgggtgtttcggtgatcacgcctaatccgaaaagctctggtggcgcgcgctggaactacctggcagcctggggctacgcgctgcatcacaacaacaacgatcaggcaaaagcacaggattttgttcgggcactgtataaaaacgtcgaagttctggattctggcgnncgcggctccactaacacttttgtcgagcgcggaattggcgatgtactgattgcctgggaaaacgaagctctgctggcagcgaatgaactggggaaagataaattcgaaatcgtcacgccgagtgagtctatcctcgcagagccaaccgtgtcggtggtcgataaagtggtcgagaaaaaaggtactaaagaggtggcggaagcctacctgaaatatctctactcgccagaaggtcaggaaattgccgcgaaaaactactaccgtccgcgcgacgctgangtggcgaaaaagtacgaaaatgcgtttccaaagctgaagttattcaccattgatgaagagttcggcggctggacgaaagcgcaaaaagagcattttgctaacggcggtacgttcgatcagatcagcaaacgctgatttccccaggataattatcaaacccggtggtttctcgcgaccgggttttttatttgtcacgattttgcgttacccttgcatctctttgaggtacagggaaaaaaagatgaaaaaagcgggtcttctttttttggtgatgatagttatcgccgttgtggctgccggtattggttactggaaattaaccggtgaagagtcggatacattacgtaagattgtccttgaggaatgtttgcccaatcagcagcaaaatcaaaatccttcgccatgtgcggaagtcaaacccaatgccggatacgtggttttaaaagatcttaatggcccactgcaatatctgttgatgccaacgtatcgtattaacggtactgaaagtcctttgttgaccgatccttcancgccnaacttcttttggttggcctggcaggcgcgtgattttatgagcaaaaaatacggccagccggttcccgatcgcgcggtttctttggcgatcaactcccgcaccgggcgtacgcaaaaccattttcatattcatatctcttgtattcgtcctgatgtgcgcgaacagctggataacaatctggcgaacatcagcagccgctggttgccactgccaggtggtttgcgcgggcatgaatacctggcgcgtcgggtaacggaaagcgaactggtacaacgcagcccatttatgatgctggcagaagaagtacctgaggcgcgggaacatatgggaagctacgggctggcgatggtacggcagagtgataactcatttgtattgctggcgacacaacgaaatctactgacgcttaaccgtgcttcagccgaggaaattcaggatcatcagtgtgagattttgcgttaaggcgaagagttaaggaaagtaagtgccggatatgaaatccggcacctgtcagacttaagcctgtttagccgcttctgcagctttaacgattactgcgaaagcgtcagctttcagagacgcaccgccaaccagcgcgccgtcgatgtctggctgagcaaacagttctgcagcgttagacgcgtttacagagccgccgtactgaatgatcacttgttcagcgatgttagcgtcaactttagcgatgtggtcacgaatgaatttgtgaacagcctgtgcctgagccggagttgcagatttgccagtaccgattgcccatacaggttcgtaagcgataaccgcaccttcgaatgccgcagcaccctgagttttcagtaccgcgtcgatntgacgtgcgcaaacttcttcagttttgcccgcttcgttttcagcttcggtttcaccgatgcacagaaccggagtcaggccctgntctttcagcaccgcgaattttttcgcgatcagttcgtcagattctttgtggtaagtacgacgttcagagtgaccgatgatgatgtactgtgcgccgatgtctttcagcatagcagcagaggtttcaccggtgaatgcgccggacaggttcaggtccacgttttgcgcacccagcatgatgtggctgccttcagcttcacgcttcgccatatcgatgtacatttccggtggtgcgattgcaaccgcacagccagcaacacctgccagctctttacgcaggttagaaaccagctcgtgaaccatgtggcggctgccgttcagtttccagttacccatcactaaaggatgtcgcattttaattctccacgcnnnnanncgaataaaggaagatggccgccccgcagggcagcaggtctgtgaaacagtatagagattcatcggcacaaaggctttgctttttgtcatttattcaaaccttcaagcgattcagatagcgccagcttaatcggttcaacagcgaaggtcagccccttttcgccgttgtcngcgacaacatagcgcagtgcacnttctgtctcggtgtaataacgtttgtttttccccgccgttagtagcgactgcagttttttctggctttgtgttttggtcattaatggggtgagtgtgcggatcaccgctgccatgtattcctgagctttcgctttcgcggctttttgctctggcccctggatgggtagccatgtcatttgaatgcttttgatttttaaggtaccgcgctccagcgctgtagaagcatacaagttctcgttaattttactggcagcacgagtgagattggctttgtcgggactgctgtcgatggcacgaaattcgttcagtggcaggctgggattctggctgttaaagtcttctcgaaactggctgatggagagatcgaaagtaggggctccagccagcagataaggcgcggtcgttgccgtatctggtgtttgtgcatgcgccgttgttgtaacggttaatgcagaacataagagaaaaaacagcgtacaccctggcttcattgacagtaccttttgttatgactggctccgattaaaacgatatctgtcgcccttgtcaaaagggtagaatcctggaaaagacaaccatcaaggaacttacatgaccatacagcaatggttattctcatttaaagggcgtattggacgccgtgatttctggatttggataggcctgtggttcgcaggcatgctggtgcttttctcactggcgggtaaaaatttactcgatattcagaccgcggcgttttgccttgtgtgcttgctctggccaacagcggcagtaaccgttaagcgcttgcatgatcgcgggcgttccggcgcatgggcatttctgatgattgtggcgtggatgctactggcgggtaactgggcgattttaccgggtgtctggcaatgggcggtagggcgttttgtcccgacgttgattctggtgatgatgcttatcgatcttggtgcgtttgttggcacacaaggcgaaaataaatatggtaaagatactcaggatgtgaagtataaagccgacaataaatcaagtaattaacctttaatatatctcttactgctatttttttccgggattgttatttccacgatgcaaatgacaatacccggaaaatccttctgaactcttcaccttacgcaatatcaaaaaaaatggtaatccataagatcattacttgtttgttcttcccttaacggcgcattattcttaagtcgtaatcgacagagaggcgaatatacagaggtgccctatgaaagatgtcgtagataaatgcagtactaaaggatgtgcgattgatatcggtacggtgattgataacgacaactgtaccagtaagttttcgcgcttttttgccacccgcgaagaagcagagtcctttatgaccaaactgaaagagcttgccgccgctgcatcctctgcagatgaaggggccagcgtggcctataagattaaggatctggaggggcaagttgagcttgatgcggccttcaccttctcatgccaggccgagatgattatttttgagttatcactgcgttcgttagcttgatggagttgctttagaaggagttaaacatggcttataaacacattggcgtggcaatttccgggaatgaagaagatgccttactggtgaataaagccctggagctcgccagacataatgacgctcacctgacgttaattcatattgatgatggcttaagcgagttgtatccgggtatctacttccctgcaacagaagatattcttcaattgttgaagaataagtcggataacaagctgtataaactgacgaaaaatattcaatggccgaagacaaaactgcgtattgaacgcggagaaatgccggaaacactgctggaaattatgcaaaaagagcagtgcgacctccttgtctgtggtcatcaccactcatttatcaaccgtttgatgccggcatatcgcgggatgatcaataagttgagtgcggatttgctcatcgtgccgtttatcgataagtaaccgcttaccagtaatgctccgctgtcatgtgacccggtcggcgacgtaaatgtttcgtcatctgccgggtctctttcagcaactgttgcgtatcgcgcaccatctgtggattgccgcacagcatcacatggctggtttctttattcatcggcaggccaatcgcgctttccagttcaccactttcaattaatgccggtatccgtccggtgagcgaccccgctgccgtttcccgactgaccaccgtctgaatgcgcagtttgccttcgtagcgtttttccagttcttgcatcagtggcaaatagcttaagtcggcggcataacgtgcggcgtgaaccaggaccagatttttgaagcgatctaaatctttacctagttgcagaatcgataaataagggccaatcgctgtaccggttgccagcatccatagcgtttcgcaatctggtacttcatccagaacaaagaagccagctgcttcgctaaccacctgcacttcatcgcccggtttcagtgccgccaatcgtgggcttaatttgccatcggggacggtgaccaggtaaaactccagatcgggattatcgggcgagttaacataggagtaggcgcgttggacgcgttcgccgtcgatttcaaggccaagcttggtaaattgcccggcggtaaacggatgcacaggggcgtgaacggtgagactaaacagggcgtcggtccagttctgcactttagtgactttgcctgttacccaatcagccatgtttttctcctgttttgattgaattgccttatcttcgttctccgaacaaaaaaattccagtcccgaaggactggaaggctcaatcgatcaaatcaatcagaggatgtgcacctgcatttccgggtctttgcgatccagatagtggatagactgaatgcggcgaatggtgcgtgatttgccgcggatcagcagcgtttcggtagtcgcgatattgcctttgcggctaatgccttccagcagatcgcctttggtaataccggtggcagagaagatgacgttatcgctgcgcgccatatcgcccagacgcaatactttaccggattcgatgcccatcgctttgcagcgtgccagctcctgctcgccaatgcgacgattctcttcgttgtcgcctttgacgtcatgacgcgccagcagacgaccgttcatgtcgccatctaatgcgcggatcaccgccgcagaaaccacgccttccggcgcgccaccaattccgtacagcacgtcaacttcgctgtctggcatacaggtgagaattgaggccgcaacgtcgccatccggaatagcaaatacgcgtacgccgagttgctgcatttcagcgataacggcatcgtggcgtggtttagccagaatcgttaccgtcagttcgctcaacggtttgccgagcgccntcncgacattgcgcaggttatccgccagcggcaggttcagatcaatggtgcctttggctcccggtccgacgatcagcttctccatatacatatctggcgcgttgaggaaacagcctttatcgcctactgccagcaccgccagcgcgttagcctgacccatcgccgtcatgcgcgtgccttcaatcggatcaacagcaatatctaccgcgtcgccgcgaccagtaccgactttttcaccaatgtagagcatcggtgcttcgtcgatttcaccttcaccaatgacgatggtgccgtcaatgttgacctggttgagcataatacgcatggcgtttaccgccgcgccgtccgcgnngtttttatcgccgcgtcctaaccatttgtagccagccagcgccgcagattcggtgacgcgggaaaattcgatggcaagttctcgtctcatagcaaactctaagcagtaaggaatggcgcgaagtgtagcacaggggaagggtgggattattgatgtgtgcggggttgcccccgcacggtttcagagtctgcgtgatgccggatgcggcgtgaacgccttatcccgcctacacaaaatggcattggctcgtaggcctgataagacgcgtaagcgtcgcatcaggcgatcagcatcaggcaatcgattcaggtgcctgacattactcgtcgtgttcttcccacgccatcgcgcgtttgaccgcttttttccagcctgcgtaacggtaattacgctcagtggtttcgatgcctggacggaactcgcgctcaatcaccgctttctcttgcagctcgtcgaggttctgccagaagccaaccgccaggcctgcgagataggccgcacccaatgcggtgacttcgcgaacttccgggcgctcaacgcgggtgccgagaatatcagactggaactgcatcaggaaattgtttgctactgcgccaccatccacgcgcagggcgtgcagacggataccagagtcggcctgcatcgcttccagcacgtcacgcgtctgataagcaatagactccagcgtcgcgcgtataatgtggttagcgttcaccccacgagtcagaccgaaaatcgccccgcgcgcatacgggtcccagtacggcgcacccagcccggtaaatgccggaaccacatacacaccattggtgttttgcactttggtggcgaaatattcggaatcgtaggcgtcgttaatcaacttcatctcatcgcgcagccactgaatggatgcgcctgccataaacaccgcaccttccaacgcatagttcacttcgccagtcgggccgcaggcgatggtggtcagtaggccgttttctgatttcaccgctttctcgccagtgttcatcagcataaagcagccagtgccataggtgttcttcgccatcccttctttcacgcacaactgaccaaacagcgcggcctgctggtcaccggcgatcccggagattggaatacgcgtgccgcctttgccgccaatgttagtctgaccgtacacttcggaagaacgacgcacttctggcagcatctcgcgcggaatatccagcacttccagcattttgtcgtcccagtccagggtatggatgttgaacaacatggtacgagaggcgttggtgtaatcggtcacatggacacggccctgagtcattttccagataagccacgtatcaaccgtaccaaacagcaattcaccacgacgcgcacgctcgcgagagccttccacatggtcgaggatccacttcactttggtgccagaaaagtacgggtcaatcaccagaccggtattgctgcggatataatcttctaaaccgtcacgttttaaatgctcgcagatttctgcggtacgacggcactgccagacaatggcgttatagataggcttgccggtttctttttcccagacaatagtggtttcacgctggttcgtaataccgatagctgcaatttgatcggaactgatatcggctttcgccagcacttctaccagcgtggagctttgggtggcccagatttccattgggtcgtgttctacccagcctggttttgggtagatttgctcaaattcgcgctgcgacacgctaatgatattggcatcgtgatccattacgaccgcgcgggagctggtggtgccctggtcgagcgcaacgatatattttttttcagtcatgtttaattgtcccgtagtcatattacagcgaagctttttgttctgaaggagttgtggtctccttttcttccacaacacagatatcgcaaggcaaatggcgaccaatcagtttgcggtaggcaaatgcacctacaatcgcgccaacgatagggccaaaaagcggcaccaggaagtaaggaatgtctctgccgccggtaaaggcgacattgccccagcccgccagccaggcaaagactttcggaccgaagtcacgcgctgggttcatggcaaaacccgtcaatgggcccatagatgcgccaatgaccgcaatcagtagaccaatcagcaagggagccaaagggccgcgtggtacaccgttgccatcgtccgttaacgccaggatcagccccatcagaatagcggtaatcaccatctcaactgcgaaagcctgcacaaaattgatatgaggattagggtaagtagagaaagtgcctgccagatcaacactttcaacgctgccgcgaacaatgtgatgagtctgctcgaagtcgaaaaataaattgtagtaaagcccgtaaactaaagccgcagcacagaaagcgccggcaacttgtgaaacgataaaaggaataactttgcgcttgtcgaaacaggcaaacagccacaatgcaatggtaacagcgggattaagatgcgcgccggaaacccctgcggtcaggtagatggccattgccacccccagtccccaaatgacactgatttcccactgaccaaaagacgcaccagcgacttttagtgctgcaacgcaacccacaccgaaaaaaatcaacaacccggtaccgaggaattcagcaatgcactggcctttcaaggttgatgtttgactcataatcggatcctgaaganttaatgtttgttgtatgcgtgaaagtcacggacctccacgatgcttgtaggcatgctgtaaacttatcgttaacgagcaaaaacgagaaatatcgaacttaaaatgtgtgtgcttcgtcataaaatgagcgttatcgcgccatttattccatctgattgtacatgatgcatgtttgttagaacattcgcgcaacaaatttattaacattttcgattggtgtggattatgtcaccaggagaaggatgaaaagtgtggcaaaccgtaatctgcaaggcgtgccgctggacagcgatggcgcggcttcatacaatcggagctaactaaagtgcgctcgtatttattaaggcgtcaccggtaatcgggacgaggattttttatccatcaacgccttgcaattcaggagaggtatgacaatgtcattagaagtgtttgagaaactggaagcaaaagtacagcaggcgattgataccatcactctgttgcagatggaaatcgaagagctgaaagaaaaaaacaactcactgtcgcaggaagttcaaaatgcccagcatcagcgcgaagagctggagcgtgagaacaaccatctgaaagaacagcagaacggctggcaggaacgtctgcaggccctgctgggtcgcatggaagaggtttaatctcttccacgcagaggcgccgcaaggcgccttattttttacttcactgtatttttagcagacaacataatctccatcgcctgttggcgatatttatctgccgtatctggctccattaatgcaatgatccccacagccctgggggtgtcttcaagataaacactgatggttcttttctgctgaccatcaaaatttatcaacacatcctgatacttacaggtgaaatgtttggcattacaatcatgaaactggaaggtttcttcattgtattgatccttgagattgtctcgctgcatcttctttaactcttccagcgagtcatcggcgctacgtcctgcgggcaggcggaaagcagaaataaagacgctattatcttcacttcttatatcaatggttttatcagtactaatagaaaccgtattccagtgtcggtttgggacagtcacggaaatagctgccttctcaaacgtatagtgccacggggtgaacagacgaaacgtattgccgacgttggataaaagcaggactcccaatacccaacagcacccgcgagtaaaactggcgaagttacgcgtttttttagtgaatgtgcacagaatacctgacacaagcacgggaagtaataacggtccaagaagtactgaaccgatatactcgccaaccatcccaggatctccagtaagcaagttactgtgctgaagatgactaagaaaaacagttattatccatagtattaataagataacgtatctcatatcaatccattattattaacatgcacatcagatcattgacgagcagaaagcatcattttcattacttcttcttgatattcgtccaaataatctgggtcgatagctgcgaccagttgtatcaaattagtgttatccagtagagtcatgaaaatagcatgtcttactttgccatcactcattgtttgcactccttcctgataagcgcaggcaaatccctgaacatcacaaacatgcatttctgcagttccgttttgagtcgcggtaagttcctcgattgaatgcacaccgagttcattttgtgagaaggcaacaatagctaaaatagcatgggcatcccgggtcaccagggttggtccttgttttactatattggcaacccactgtttgctcggaaccgtgacggtgatacctggctccgggaaagtataatcccatatgctgtgtcgttcccacaccgtatagctgctatagataagaaataatcccattaaccaacaagtgccgcgaataaagctgcggctgcttcttttttttatcgttatacagatgattgtggcgataataaatgataaggcaagtgggttaaaaaatacgttagcaaaatataaaatcatttcacccgcgttgccagataaaagaaatttgtagcggaaatggttaacggctataagtaataaatatataaataaaagaataatattctgcatgaatacgtccatgtataaaaaaggggaatttaattccccttttaacgcatggcagatacttattcaatatccagcggatcttctgaaagaataatcccggtattgtcggcataaagatggtcgccggagaagaaggtaacaccgccaaaattgacgcggacatcgctttcgccaatgccttcgccagcggcaccaaccggaattgccgccatcgcctggatgccgatatccaactcttccaggtcatctacctgacgcaccgcgccgtaaatgaccagaccttcccattcattttgtactgccagacgcgccagttcagcatcgaccagtgcgcgacgaacagaaccaccgccatcgacgacaagaacacgaccacggccattctgttcgagcagatcgtacagcaacccgttgtcctcgaaacattttaccgtgattatttgtccgccaaacgacgcccgtccgccaaagttggagaacagcggttccacgacgttaacatcttcttgatagatgtcacaaagctcggaagtatcgtatttcataggcttaacattcagttgctgcgagaattttcagtatatcgcgctatgtggtctgttggcaaaatcatcaattgttaattgatatttgtcagttatgctgcccactggcttaggaatatccctacaacaaacagcaggttagtcagtaacgctcccttgacagtgcgttccagcatcggtcgcatcgccaccgggtccatttcccgcatcacataacgggcttgcttcaccagcaacggtgccgccagcaggaacagccagccccacaggctatgcagcgaaaagagattaaacagcgccagacataccagagagcccatcagcaggcaggcatgataacgacgcgcgttcacttcacctaagcgcaccaccagcgtgtttttgccgttttcgcggtcgctattgatatcacgcaggttattaatgttcagtactgccgttgccagcaggccgcatgcggtcgccggaaggatcagtgccggaatcaatgtatgagcctgtaaataccagctccccatgacgcttaaccagccaaagaaaaccagtacggaaatatcacccagnccgatataaccataaggacgattgcccacggtgtaggtgatagcggcaatgatcgacaacccgccaagaatcaggaaaccgacaaaatcggccagcgtatggcacgccactgcaaccagtgccagcccggagagacagatgagcacgacggtaataatgagcgcccgtttcatctcttgctgggtaatgacccctttttgcatgccgcgtagcggtccgatacggtcaggtttatcgctgccttttaccgcatcgccgtaatcattggcgaggttagaaaggatctgtaatagcccggcggtaatcagtgccagcagggcgaccagcggatcaaaatgaccttgccaccatgccagcgccgtcccgacgataattgcagcaaaggcgagggggagggttttaggtcgtaaactttccagccacgcctgagttcggctaatttgttgttcagtcataatacgcgccaataaaaatggggcctttcagccccatcaaacaatgatgaaaatgattgaacgcgattataggataaaacggctcagatcttcatctgccaccaacgcatccagatgtttgctcacataatctgcgtcaatagtgatattttgaccgcttaaatcgctggcgtcgtaggaaatctcttccattaaacgctccagaacagtgtgtaaacgacgagcaccgatgttttcggtagattcgttcacctgccatgccgcttccgcgatgcgtttaataccggagtcggtaaactcgatatttacgccttcagtcgccatcagtgctttgtactgcacggtgatagaggcattcggctcggtcagaatacgctcgaagtcgctggtggtcagtgcctgcagttcaacgcggattggcagtcgaccttgcagttccgggatcaggtcagacggtttcgcaatctggaacgcgccagaagcgataaacagaatgtggtcagttttgaccatcccgtgtttggtggaaacggtgcaaccttctaccagcggcagcaggtctcgctgaacgccttcacgagaaacatccggaccggaagactcgccgcgcttacagattttgtcgatttcgtcgataaacacgatcccgtgctgctcaacagcgtcgatagcgtcttgcttcagctcttccgggttcaccagtttcgccgcttcttcttcaatcagcagcttcatggcgtctttgattttcagcttacgcgctttttgcttctgaccgcccaggttctggaacatggactgcagctggctggtcatctcttccatgcctggaggagccataatttcaacgcccatcggtgctgcggcaagatcgatctcgatttctttgtcatcaagctggccttcacgcagttttttgcggaatgcctgacgagcagcggacggttcctgctgctgttcggtctgtccccagttgtttttagcaggtgggatcagcacgtcgagaatacgttcttctgccagttcttcagcgcgataacggtttttctcgatagcctggacgcgtaccattttcacggcggcatcggtcagatcgcgaataatagaatccacttccttaccgacgtagcccacttcggtgaatttggtcgcttcaactttgatgaacggcgcattcgccagcttagccagacgacgggcgatttcagttttaccgacaccggtcgggccgatcatcaggatatttttcggggtcacttcatggcgcagctcttcgttgagctgcatgcgacgccagcggttacgcagagcaatcgccacggaacgcttggcgttgtcctggccgatgatgtgcttatccagttcgctgacgatttcgcgtggggtcatttcagacatgggagatccttacgctttgtagcttaattcttcgatggtgtggaaatggttggtatagatgcaaatgtcgcctgcaatatccaacgccttttcagcaatttcacgagcactaagttcagtattttctaacagtgcacgcgccgcagcctgggcgtaagggccgccggagccgatagcaataagatcgttttctggctgcaccacgtcaccgttaccggtgatgataagcgatgcagtttcatccgcgactgccagcagtgcttcaagtttgcgcaacatgcgatcggtacgccagtcttttgccagctcaacggcggctttgaccagatggccctgatgcatttccagtttacgttcaaacagttcgaacagcgtaaaagcatccgcagtaccgcccgcaaagcccgcgatgactttgtcgttgtacagacggcggacctttttcacgttgcctttcattacggtattgcccaacgtggcctgaccatcaccagcgatgaccacatggccgttacggcgtacgcttactatagttgtcacgagctgaccccttggttacgaatacagagtacaaaccccgtacaaaagtacggggcataatgcaattatagatgggggggattttgagggtttcaacccccggcggcgagccgaatgcagtttgtatgacccgccatcttcaaccgattgagggtgctgtctgcgttctctttgcctttcaccgggccaatgaccacacgattccagccattgttggtggtaatttttgagtcaaagccttcgaacgccagctgagcacgtaccgtctctgcctgttccgcgcctctgaacgaaccgcactgcaccatccagcggcgttcgtcttttttctccgccgtcggttttggcgcgtcagcggcacgagtaaccggcgcagcttgctgcggcttcgactgcgcggtcgtgtgcgcaggggtttgcagcagatcctggtacggctgctgagtagaagccggtttagactggcgcggttgcgcctgtnnnngcgcggcttgcgacgtacgcgtctgctgctgccagctttgttcagtcgtacgcgactgctgagccaggcgttgctgttccgctaattgctgcgcctgacgttggcgctgtagcgtttgctgacgctgttccggcgtctgttcattccacggaacttcaaccagctgcgttggctgctggcgcatatcagcctgcatttgttcaagaagctgacgttgttctggtgtcagttgctccggcgttttcacttcaccaccggcagaaggttctgtgggcgcacgcacacccggctggcgactttccagctctttgatgtagcgccagcgttcttctggttttggtggtagtccgtttccggtcactttctggctttgcagcgtctcggactcttctttcttgtgatgcgtaatgaagtacagaccaccgataaaggtcacaagaacggcggcagcaatagcgaccatagcgggagaaaccgcaggcagatttcgttgctttttccgtgaggtgctcttttttcgccgcgaaggtgccggttggctgcggcgtacataatctcgttgtgccactatcgtttcgctgtatttattcgttcgtcagcccgccatgttacttaagcggcgggcctttgaccagtcacggcagtcttaaaggtttactttaaggtaacgcgcgtgttgatccccggatgataagttcgcagtccattaaacgagagccactgccaacgtgttgcccctgcatttgatcaagcaataacagcatagcttcccgaccgatttcgtaacgcggctgcgcgatggttgtcagcggcggatcacaaaattgcgtcaggtcgatgttatcaaaaccgattatggaaaggtcttccgggactttcagcccctggcgttttgcctgagaaagtgcgccgagcgccatcacatcgctatggcagaagacagcagtaggcggttgtggaagatcaagcagctgctgcatcgctttgcttccggcttcgaaggtgaagtcgccacgggcgatgtattgcggatcaaccataatgccgcagcgacgcagcgcctgaacgtaaccttgcaggcggtagtgacacagcggcatctcttcgggaccggctatacagccaatccgtttatgcccttgctcatataaataatttactgcatcaaatgcggcggtcagattgtcgatatgaacggtaggcagctccagttccggtgcaaattcgttcgccatcaccatcggcggcagattacgctgttcctcaatgctggcatcaaacggcagccttgaacccagcagcaacatgccatcaatttgcttggtgatgatcaaatcgataaaggttttttcctgctgattttgatgcgcacagtcgccaatcagcaccagatatccgtgatttgccgccgtaacttcgataccgcgaataatttcgctaaagaagggatcgcagatatccgggacaatcaccagaatggtgcgggattcattacgcttgacgttgcgccccataggctgcggtaaataacccacttcacgggccgctttttcaacccgattacgggtggcttgggagactttatcgggattcattaatgctcgggagacggtcgctgtagagacttttgccttgagggcaacgtctttcatggtcgcggcagtttcctgcttcttcgctttcacactcactcctcgcctggcacgtcaggcgtactacatccatgtttacttcacatcggcaacatttttagcagatagcgcgtgaaaacggttacagaattttcatgaaaagtgtgatgaatattgaatttttcgatccgcctcgcatcgtgagcggtttaaccctcaatcggatcaacatccagcacccatttcaccttacgggaatccggtattgtattgatgagtgccagcgtaccgttaatgatgtgttgcaagcgcacgcgggaagggtgctgcaacaatatctgccagcgccagcgaccgccacgtttaggtgccagtgccggaaccggaccgagaacccacaatttgtcgtctgccagcgggctggagaggatcagattacgcagttgttgcaggaacaatggcgcgtgctgattgttatgatcttccgcacgcacaatcacatggctggtccacggcggcagttgcatcattcgccgctcagccagtgcctgttcggcaaaagcgtcgtagcctttatagagcaacgtttgcaatagcgggtgttccggatgatgcgtttgcagcaccacttcgccctgtttacccgcacgcccggcacggcctgctacctgggtgtatagctgggcaaaacgctctgccgagcgaaaatcggcagaaaacagcgcgccgtccacatccagtaacgctaccagcgtcacatccggaaagtggtgacctttcgccagcatttgcgtgccaatcaatatcctcgcgccgccgcgatgcacttccgccagttgttgttccagcgctcctttgcggctggtggtatcgcggtcgatacgagaaatgggcacaccagggaataacggcgcgagcgtctgttcaagctgttcggtgcccagccccacgggtaccaggtgcgtggaaccgcaggaagggcactggcgcggcaccgggcgttggctgtcacagtggtgacagcgcaaatgctgttgcgcctgatgcagcgtgtagtagtgatcgcaacgtggacattcggcaatccagccgcagtcgtggcacagcaaggcaggcgcaaagccacggcggttaagaaagaggataacctggttgtcggcctgtaaatgctggcgcatacgggtgattaacgccggagccagccccgcctgcaccttctgaccttttaaatccagcacatgttgaattgccggacgcgcattccccgcccgacgcgtcaggcgcagcaggcggtattttttntgctggacgttgcataacgtttccagtgcgggtgttgcggagccaagaataatcgggatttgctcgctgtgcgcacgataaaccgccaggtcgcgggcatgatagcgccagccttcctgctgcttgtaggaactgtcgtgctcttcatcaatgacaatcacaccgagatttttaaacggcgtaaacagcgcggagcgggtgccgatgacaatcgccgcctcaccatttttcgctttcaaccacgccgaaagacgctcgctgtcgttcaggccggaatgcagaacttctacgggggcattaaaacgttcacgaaaacgggcgatagtttgcggtgtcaggccgatttccggcaccatcaccagcgcctgtttgccctgagcgagcacgttttccagtacgctcaaataaacctctgttttaccggaacctgtaacgcccgccagcagccaagcagagaaggtatccgccgcgctatgaattgcgccaacggcggtggcctgttcggtattcaatcgcaaccgttcaccagaaacggcatagttcgttcgccagtcgctaaactctggtgtttcacttgctaaatcacacagaccttttttgcgcagcgcctgtaacgcggcatcattaaattcaagcgtggcaacctggtcgcgccagattttgccttgccgcaatgccgccagtgcctgttgttgctttggcgaacgtttcaggctgttcagatccaccgcatggccttgttcagtggcaaaccagtaccacatcggcgcgttcgccgcaggccgcccctggcgcagtaaaatcggcaaggcatgaaacagcacatcgccaatcggatgatgatagtaatccgccgcccagagcagcaatcgccagacggagtgagtaaacaccggctcactatccagcacttcgactaccgcttttagctcgttaagcggcagctcactgacgtcgctaactgacaccacaaccccgatgcgctcctgctgtttgccaaacggcacgcgcacgcgacacccggctttaaccgccatgccttctggcaggagatagtcaaaggtacgaggaagcggaacgggcaaggcaacgtgggcaacgggcatagcatcatcctgacttgaaattcggtgggttagtatacacattgccgtagaagagtgcggatcagtttgcatacgctggttaatttctgtatgatttcgcgccttcgtacgaaatgatcgtattgaagctatacttttaacatcgcgtggtgtctggcgttagggctggaagagcgacgcggccttaaaccgaggttttcccatgaaaaaagatattcacccgaaatacgaagaaattactgctagctgctcttgcggtaacgtaatgaaaatccgctccaccgttggtcatgacctgaacctcgacgtgtgcagcaagtgccacccgttcttcactggcaaacagcgtgatgttgctaccggtggccgtgttgaccgcttcaacaagcgtttcaacatcccgggcagcaaataagaccggatttccgaaaaaagcgcnnnnnnnnnntttttttgtgcctgtaatttgccttttataaattctgaaaaattccggggtgttaactcattatcatttcctgttgttgactggcgctaggcttctggttcttatttatttcaaaaggattttacgatgagcggaaaaccggcggcgcgtcagggcgacatgacgcagtatggcggtagcattgtncagggttcagccggggtgcgcattggtgcccccaccggcgtggcctgttcggtgtgccccggcggngtgacgtccggccatccggtcaatccgctgctnggtgcaaaggtccttcccggtgaaaccgacatcgccctgcccgccccgctgccgttcatcctctcccgcacctacagcagttaccggacaaaaacgcccgcgccggtggggagcctcggccccggctggaaaatgcctgcggatatccgcttacagctgcgcgataacacactgatactcagtgataacggcggcagaagcctgtattttgagcacctgtttcccggtgaggacggttacagccgcagcgagtcactctggctggtgcgcggcggcgtggcgaaactggatgaaggtcaccgggctggccgcactctggcaggcgctgccggaagaactccgcttaagtccgcatcgttatctggcgacaaacagtccgcaggggccgtggtggctgctcggctggtgtgagcgggtgccggaagcggatgaggtgctgcctgcgccgcnnccgccgtaccgggtactgaccgggctggtggaccgcttcgggcgcacacagacgttccaccgcgaagccgccggtgaattcnnnngcnnaatcaccggcgtgacggatggtgccgggnntcacttccggctggtactgaccacgcaggcgcagcgggcagaagaagcccggnngcaggccatttccggcgggacggaaccgtccgcttttcctgataccctgtcgggttacaccgaatatggccgggacaacggcatccgtctgtctgccgtgtggctgacgcacgacccggaatacccggagaatttacctgccgcgccgctggtgcgctatggctggacgcnncgcggcgaactggcggtggtgtatgaccgtagtggcaaacaggtgcgcagctttacttacgatgataaataccggggccggatgntggcgcaccgtcacacgggccggccggaaatnnnnnnnnnnnnnnnnnnnnnnnnggcgggtgacagaacagctaaacccggcaggcttaagctacacgtatcagtatgagaaagaccgcatcaccatcaccgacagcctgaaccgccgtgaagtcntgcacacgcagggtgaaggcgggctgaagcgggtggtgaaaaaggaacacgcggacggcagcgtcacgcagagtcagtttgacgcggtgggcaggctcagggcacagacggatgccgcaggcaggacaacagaatacagcccggatgtggtgacgggcctcatcacgcgcatcaccacgccggatggcagggcatcggcgttttactataaccaccacagccagttaacgtcagccaccgggcctgacgggctggaaatacgccgggaatatgatgaatggggccgtctgattcaggaaactgcccctgacggcgatatcacccgctaccgttatgataatccacacagtgacttaccctgcgcaacggaagatgccaccggcagccggaaaaccatgacgtggagccgttacggtcagttgctgagcttcaccgactgttccggttatgtaacccgttatgaccatgaccgcttcgggcagatgacggcggtgcaccgcgaggaagggctgagtcagtaccgcgcatacgacagccgtggacagttaattgccgtgaaagacacgcagggccatgaaacgcggtatgaatacaacgccgccggtgacctgaccaccgtcattgccccggacggcagcagaaacgggacacagtacgatgcgtggggaaaagccatctgtaccacgcagggcggtctgacgcgcagtatggaatacgatgctgccggacgggtcatccgcctgaccagtgaaaacggcagccacaccaccttccgttacgatgtactcgaccggctgatacaggaaaccggctttgacggccgcacacagcgttatcaccannnnctgaccggcaaacttatccncagcgaggatgaggggctggtcacccactggcactatgacgaagcagaccgcctcacgcaccgcaccgtgaagggtgaaaccgcagagcgctggcagtatgacgaacgcggctggctgacagacatcagccatatcagcgaagggcaccgggtgacggtgcattacgggtatgatgagaaaggccggctgaccggtgagcgtcagacggtgcatcacccgcagacggaagcactgctctggcagcatgagaccagacacgcttacaacgcgcaggggctggcgaaccgctgtataccggacagcctgcccgccgtggaatggctgacctatggcagcggctggctggcaggcatgaagctcggcgacacaccgctggtggatttcacccgcgaccgcctgcaccggaaaacgctgcgcagattcggccgttatgaactcaccaccgcttatacccctgccgggcagttacagagccagcacctgaacagcctgcagtatgaccgcgattacacctggaacgacaacggcgaactcatccgcatcagcagcccgcgccagacccggagttacagctacagcgactccggcaggctgaccggcgttcacaccaccgcagcgaatctggatatccgcatcccgtatgccacggacccggcaggtaaccgcctgcccgacccggagctgcacccggacagcaccctcagcatgtggccggataaccgtatcgcccgtgacgcgcactatctttaccggtatgaccgtcacggcagactgacagagaaaaccgacctcatcccggaaggggttatccgcacggatgatgagcgcacccaccggtaccattacgacagtcagcaccggctggtgcactacacgcggacacaatatgcagagccgctggtcgaaagccgctatctttacgacccgctgggccgcagggtggcaaaacgggtgtggcgacgtgaacgggacctgacgggctggatgtcgctgtcacggaaaccgcaagtgacctggtacggctgggacggcgaccggctgaccacgatacagaacgacaggagccgcatccagacnatttatcagccggggagcttcacgccactcatcagggttgaaaccgccaccggtgagctggcgaaaacgcagcgccgcagcctggcggatgcnnnnnngnanncnngcggcgaagacggtggcagtgtggnnttcccgccggtgctggtgcagatgctcgaccggctggaaagtgaaatcctggctgaccgggtgagtgaggaaagccgccgctggctggcatcgtgcggcctgactgtggcgcagatgcaaagccagatggacccggtatacacgccggcnnnnnnnnnncacctgtaccactgcgaccatcgcggcctgccgctggcccttatcagtaaggaaggggcaacagaatggtgcgcagaatacgatgagtggggcaacctgctgaatgaagagaannnncatcagnngcagcagcttatccgcctgccgggncagcagtatgatgaggagtccggcctgtattacaaccgccaccgctattatgacccgctncaggggaggtatatcactcaggatccgattgggctgaaggggggatggaacctgtatacatatccgctgagcccggtgaatggcatggatccattaggattatatgaatttaaatcaaaaaatatagatgatattggaatatttgcattggcaatgtgtaatggagaatcaattaacgagaataaagaatatggtggactaatatgtaagaagcaaggtgaatatttccccatgaatccgataagttcaaatgataatgatagtgtagacttgcgaaatataaaatgccctgaaggttcagagagagtaggcgattatcacactcacggtttttactctgacgataaaggaaataaagtaacaaaagaaaatgatgtttatgatagtctaaatttttcaagcaaagatttaacgaattcttatatgaatggaatgggaaaaaaagaatacagtagttacttgggaacaccaaataacacctatctaaaatataatcccaaagctaaagggaatggagttacaattatcaggcaagggagtaattaaaatgaaggcaatacaatgttgttatttccttgctttagtctccagtcatttaatggctggagttatgagtgatgacaatatatttttaagtaattcggatttagctgctttatattgtgtggctaaaatatttccagatggagaaaatattttaatatataaagtaaatataattaatgctagttcaaaaaagatgtatttttttatgaaagcccaacatcaacccacaatgacataatggggggcgggggaatgtcatatgcctatgaatatgatgtaaaatataatatatgtcatttgagaaaaaagagcagaatgaggtaaaaatctttggctgtgtattcagtctggtaatcatccaaggaaagctcatcagaagggtgatgactccaattagtagaacatatattttcgataaaagcaccgatgactttttcatgaagttctacagaactcgagaaacagatggttctgcgggccagacgtttgattcgggttctcagggtcagattgttacgctcaatgtgctgagtaaaaatcttaccagtcagatgcttctcctttggtaactctctagcgtaactaccccattcgtcagtggtcaacatgccgatggtaaaagggtaagcagcgccagcaattcacgacaggtttcatcagtccgggggccaaaagtgtaggccagaacaccaccagttttcgtgttgtacacgtaccagagccagtgctgtcgcgctttactgccgacaaagctccattgctgactaagtttgcagatgagtgccacatcagcatgagcgaccggggatgacgttattcttcgtggcgagagttttttaaagttcggatgactgtattaatgccgattttcagcgtacgggcagtatagcgaaccccggcaccgttgaaagccatttcagcgatttggtctttaactcccggtttacggggctcgtaacagtaactgagctgaaatacccggtgacagtcacggccgcggaatcgatcatgtcttttggggttctgcccgcgacggtaaacctgaacggactggcaacggggacaatgaaggttaactgtgaccatgaaacatccttaaaagcgagtattatatccttaattcaactaattggaggcatcaccgtttaccggagcgacagcttgcggaaaggtcgtgcaactacaaagcaacaaacagactacggcgggaattatttttttcatcatccattaccacgaaaacagcggccattctttggcaaccgtggtgagttgtggcgcatcgaaaacggcttgtggtgagaccaccgtttcctcaagcggaatatttttgccgtancgttctttgagcttcgcctggaccagcgggttgctgagatcaaactctttcaacttctgctgttcgcccacacgcattcccagcgcattctgataaaccttccacaccacttccgaacagtactggcgatcgtcgctccatgagaagctgaaatcgtacggtttgccgagataacgtttcgccgtttgcgccagtttttgctgttgttcaacactcagtccgccttcaacgcggcgaacaacgtatttgcccttttcaccatgggcaatccactgcttgagcggggtgtatttcaccgggccgaccgcttcaaaaacgtagggctttttgttacgcatcaccagcataccggtgtggctgtaatcggaatgggtcgccagttggatcgctttactttgcgatgagcgagagatttgaaagatgatgtcgccagtttgcggctgccaggcaaaggcaggcacagaaaccagcaggctgaggatcagtagcctgattttcatcgttaaacgtccttgtatgaaaaaagcggctggttaactccgcgccgctcttttccgctttagtattcccacgtctccgggttaatccccatctcacgcatgatctcttttgccgcttccgggatttcgtcgctgcgctctttacgcagatcggcatcatccggcaaaggttgcccggtaaaggcatgcagaaacgcttcgcacagcagctcgctgttggtagcgtgacgcaggttgttcacctgacgacgcgtgcgttcatcggtgaggatttttaacaccttaagaggaatggaaaccgtaatctttttgacttgttcactcttcttgccgtgctcagcgtatgggctgatatattcgccgctccattcagccatgagatacttaatcctcttcgtcaataaattgagaccagaccacacaatttatgtgggtactgaccgtaaacccgcatagtttaccgtacaggcgttaccgtgacatcgtgtaatgcacctgtcggcgtgataatgcatataattttaacggctatttgggatttgctcaatctatacgcaaagaagtttagatgtccagatgtattgacgtccattaacacagtgtttactctggtgcctgacatttcaccgaccaagcccagggaacttcatcacatgacgcgtaaacaggccaccatcgcagtgcgtagcgggttaaatgacgacgaacagtatggttgcgttgtccctcccatccatctttccagcacctataactttaccggatttaatgaaccgcgcgcgcatgattactcgcgtcgcggcaacccaacgcgcgatgtggttcagcgtgcgctggcagaactggaaggcggtgctggtgcagtacttactaataccggcatgtccgcgattcacctggtaacgaccgtctttttgaaacctggcgatctgctggttgcgccgcacgactgctacggcggtagctatcgcctgttcgacagcctggcgaaacgcggttgctatcgcgtgttgtttgttgatcaaggcgatgaacaggcattacgggcagcgctggcagaaaaccccaaactggtactggtagaaagcccaagtaatccattgttacgcgtcgtggatattgcgaaaatctgccatctggcaagggaagtcggggcggtgagcgtggtggataacaccttcttaagcccggcattacaaaatccgctggcattacgtgccgatctggtgttgcattcatgtacgaaatatctgaacggtcactctgacgtggtggctggcgtggtgattgctaaagacccggacgttgtcactgaacttgcctggtgggcaaacaatattggcgtgacgggcggcgcgtttgacagctatctgctgctacgcgggttgcgaacgctggtgccgcgtatggagctggcgcagcgcaacgcgaaggcgattgtgaaatatctgcaaacccagccgttggtgaaaaaactgtatcacccgtcgctgccggaaaatcaggggcatgaaattgccgcgcgtcagcaaaaaggctttggcgcaatgttgagttttgaactggatggcgatgagcagacgctgcgccgtttcctgggcgggctgtcgttatttacgctggcggaatcattagggggagtggaaagtttaatctctcacgccgcaaccatgacacatgcaggcatggcaccagaagcgcgtgctgccgccgggatctccgagacgctgctgcgtatctccaccggtattgaagatggcgaagatttaattgccgacctggaaaatggcttccgggctgcaaacaaggggtaaaaatgagtgtgattgcgcaggcaggggcgaaaggtcgtcagctgcataaatttggtggcagtagtctggctgatgtgaagtgttatttgcgtgtcgcgggcattatggcggagtactctcagcctgacgatatgatggtggtttccgccgctggtagcaccactaaccagttgattaactggttgaaactaagccagaccgatcgtctctctgcgcatcaggttcaacaaacgctgcgtcgctatcagtgcgatctgattagcggcctgctacccgccgaagaagccgatagcctcattagcgcttttgtcagcgatcttgagcgcctggcggcgctgctcgacagcggtattaacgacgcagtgtatgcggaagtggtgggccacggcgaagtgtggtcggcgcgcctgatgtctgcggtgcttaatcaacaagggctgccagcggcctggcttgatgcccgcgagtttttacgcgctgaacgcgctgcgcaaccgcaggttgatgaagggctttcttacccgttgctgcaacagctactggtacaacatccgggtaaacgtctggtggtgaccgggtttatcagccgtaacaacgccggtgaaacggtgctgctggggcgtaacggttccgactattccgcgacacaaatcggtgcgctggcgggtgtttctcgtgtaaccatctggagcgacgtcgccggggtatacagtgccgatccgcgtaaagtgaaagatgcctgtctgctgccattgctgcgtctggatgaagccagcgaactggcgcgtctggcggctcccgttcttcacgcccgtactttacagccagtatccggtagcgaaatcgacctgcagctgcgctgtagctacacgccggatcaaggctccacgcgcattgaacgcgtgctggcctccggtactggtgcgcgtattgtcaccagccacgatgatgtctgcttgattgagtttcaggtgcccaccagccaggatttcaaactggcgcataaagagatcgaccagatcctgaaacgtgctcaggtgcgcccactggcggttggcgtgcataacgatcgccagttgctgcaattttgctacacctcagaagtggccgacagtgcgctgaaaatcctcgacgaagcgggattacctggcgaactgcgcctgcgtcaggggctggcgctggtggcgatggtcggggcgggtgtcacccgtaacccgctgcattgccaccgcttctggcagcaactgaaaggccagccggtcgagtttacctggcagtccgatgacggcatcagcctggtggcagtactgcgcaccggcccgaccgaaagcctgattcagggcctgcatcagtccgtcttccgcgcagaaaaacgcatcggcctggtattgttcggcaaaggcaatatcggttcccgctggctggaactgttcgcccgcgagcagagcacgctttcggcgcgtaccggctttgaatttgtgctggcaggcgtggtggacagccgccgcagtctgttgagttatgacgggctggacgccagccgcgcgttagccttcttcaacgatgaagcggtcgagcaggatgaagagtcgttgttcctgtggatgcgcgcccatccgtatgatgatttagtggtgctggacgttaccgccagccagcagctggctgaccagtatcttgatttcgccagccacggtttccacgtcatcagtgccaacaaactggcgggagcaagcgacagcaataaatatcgccagatccacgacgccttcgaaaaaaccgggcgtcactggctatacaacgccaccgtcggtgcgggcttgccgatcaaccataccgtgcgcgatctgatcgacagcggcgatactattttgtcgatcagtgggatcttctccggcacgctctcctggctgttcctgcaattcgacggtagcgtgccgtttaccgagctggtggatcaggcgtggcagcagggcttaaccgagcctgatccgcgtgacgacctctccggcaaagacgtaatgcgcaagctggtgattctggcgcgtgaagcgggttacaacattgaaccggaccaggtacgtgtggaatcgctggtgcctgctcattgcgaaggcggcagcatcgaccatttctttgaaaatggcgatgaacttaacgagcagatggtgcaacggctggaagcggcccgcgaaatggggctggtgctgcgctacgtggcgcgtttcgatgccaacggcaaagcgcgtgtgggcgtggaggcggtgcgtgaagaccatccgctggcatcactgctaccgtgcgataacgtctttgccatcgaaagccgctggtatcgcgacaacccgctggtgatccgtgggcctggcgcggggcgcgacgtcaccgccggggcgattcagtcggatatcaaccggctggcacagttgttgtaatttcagaaatttaataatgcccggtactcatgttttcgggtttatggtttctaatgaaatatattgaattatcataggattaggccggatgaagcgtttacgacgaatccggcaagaagcaataagtacatggttagtttatatttgcagtccggtttgctttgcataccggattttctttttcttaccatcctgaagttttttcatcttccctgatttttcctcaccatcattggtcatttttcggttgacgcccttcggcttttccttcatctttacatctggacgtctaaacggatagatgtgcacaacacaacatataactacaagcgattgatgaggtaaggtatgagcttttttcacgccagccagcgggatgccctgaatcagagcctggcagaagtccaggggcagattaacgtttcgttcgagtttttcccgccgcgtaccagtgaaatggagcagaccctgtggaactccatcgatcgccttagcagcctgaaaccgaagtttgtatcggtgacctatggcgcgaactccggcgagcgcgaccgtacgcacagcattattaaaggcattaaagatcgcactggtctggaagcggcaccgcatcttacttgcattgatgcgacgcccgacgagttgcgcaccattgcacgcgactactggaataacggtattcgtcatatcgtggcgctgcgtggcgatctgccgccgggaagtggtaagccagaaatgtatgcttctgacctggtgacgctattaaaagaagtggcagatttcgatatctccgtggcggcgtatccggaagttcacccggaagcaaaaagcgcccaggcggatttgcttaacctgaaacgcaaagtcgatgcaggagccaaccgcgcgattactcagttcttctttgatgtcgaaagctacctgcgttttcgtgaccgctgtgtgtcggcgggcattgatgtggaaatcattccgggcatattgccggtatctaactttaaacaggcgaagaaatttgccgacatgaccaacgtgcgtattccggcgtggatggcgcaaatgtttgacgggctggatgacgatgccgaaacccgcaagctggtgggcgcgaatattgccatggatatggtgaagattttaagccgtgaaggagtgaaagatttccacttctatacgcttaaccgcgctgaaatgagttacgcgatttgccatacgctgggggttcgacctggtttataaatagtgtggcttttatgaaaatcacacagtgatcacaaattttaaacagagcacaaaatgctgcctcgaaatgagggcgggaaaataaggttatcagccttgttttctccctcattacttgaaggatatgaagctaaaacccttttttataaagcatttgtccgaattcggacataatcaaaaaagcttaattacgatcaatttgatctacatctctttaaccaacaatatgtaagatctcaactatcgcatccgtggattaattcaattataacttctctctaacgctgtgtatcgtaacggtaacactgtagaggggagcacattgatgagcacgtcagacgatatccataacacgacagccactggcaaatgcccgttccatcagggcggtcacgaccagagcgcgggggcgggtacaaccactcgcgactggtggccaaatcaactccgtgttgacctgttaaaccaacattctaatcgttctaacccgctgggtgaggactttgactaccgcaaagaattcagcaaattagattactacggcctgaaaaaagatctgaaagccctgctgacagaatctcagccgtggtggccagccgactggggcagctacgccggtctgtttattcgtatggcctggcacggcgcggggacttaccgatcaatcgatggacgcggtggcgcgggtcgtggtcagcaacgttttgcaccgctgaactcctggccggataacgtaagcctcgataaagcgcgtcgcttgttgtggccaatcaaacagaaatatggtcagaaaatctcctgggccgacctgtttatcctcgcgggtaacgtggcgctggaaaactccggcttccgtaccttcggttttggtgccggtcgtgaagacgtctgggaaccggatctggatgttaactggggtgatgaaaaagcctggctgactcaccgtcatccggaagcgctggcgaaagcaccgctgggtgcaaccgagatgggtctgatttacgttaacccggaaggcccggatcacagcggcgaaccgctttctgcggcagcagctatccgcgcgaccttcggcaacatgggtatgaacgacgaagaaaccgtggcgctgattgcgggtggtcatacgctgggtaaaacccacggtgctggtccgacatcaaatgtagntcctgatccagaagctgcgccgattgaagaacaaggtttaggttgggcgagcacttacggcagcggcgttggcgcagatgccattacntctggtctggaagtggtctggacccagacgccgacccagtggagcaactatttcttcgagaacctgttcaagtatgagtgggtacagacccgcagtccggctggcgcaatccagttcgaagcggtagacgcaccggaaattatcccggatccgttcgatccgtcgaagaaacgtaaaccgacgatgctggtgaccgacctgacgctgcgttttgatcctgagttcgagaagatctctcgtcgtttcctcaacgatccgcaggcgttcaacgaagcctttgcccgtgcctggttcaaactgacgcacagggatatggggccgaaatctcgttacatcgggccggaagtaccgaaagaagatctgatctggcaagatccgctgccgcagccgatctacaacccgaccgagcaggacattatcgatctgaaattcacgattgcggattctggtctgtctgttagtgagctggtatcggtggcctgggcttctgcttctaccttccgtggtggcgacaaacgcggtggtgccaacggtgcgngtctggcattaatgccgcagcgcgactgggatgtgaacgccgcagccgttcgtgctctgcctgttctggagaaaattcagaaagagtctggtaaagcctcgctggcggatatcatcgtgctggcaggtgtggttggcgttgagaaagccgcaagcgccgctggtttgagcattcatgtaccgtttgcgccgggtcgcgttgatgcgcgtcaggatcagactgacattgagatgttcgaactgctggagccaattgctgacggtttccgtaactatcgcgctcgtctggatgtttccaccaccgagtcactgctgattgataaagcccagcaactgaccctgaccgcgccggaaatgaccgcgctggtgggcgggatgcgtgtactgggtgccaacttcgatggcagcaaaaacggcgtcttcactgaccgcgttggcgtattgagcaatgacttcttcgtgaacttgctggatatgcgttacgagtggaaagcgaccgacgaatcgaaagagctgttcgaaggccgtgaccgcgaaaccggcgaagtgaaatacactgccagccgtgcggatctggtatttggttctaactctgtcctgcgtgcggtggctgaagtttacgccagcagcgatgctcacgagaagtttgttaaagacttcgtggcggcatgggtgaaagtgatgaacctcgaccgtttcgacctgctgtaatctgaccttcttcagcgactgcctttcaggcagtcgctgaagtttctttaccggcgtatagtgtccacaggaaaactacacactggatctctcatgtctgccgcaggaaagagcaacccactggcaatcagtggcctggttgtgctcacacttatctggagttatagctggattttcatgaagcaagtcaccagctacatcggtgccttcgactttaccgccttacgctgcattttcggcgctctcgttttattcatcgtccttttattacgtggtcgcggaatgcgcccgacaccgtttaaatacaccttagccattgccctgttacaaacctgcgggatggttggcctggcgcagtgggcgctggtcagcggcggagcggggaaggtggcgatcctgagctataccatgccgttctgggtggtgattttcgccgcggtgtttctcggtgaacgcctgcgacgtgggcaatatttcgcgattctgattgccgctttcggcttatttttggtgttgcagccgtggcaactcgatttctcttcgatgaaaagtgccatgctggcaatcctctccggtgttagttggggggcgagcgcgattgttgctaaacgtctgtatgcccgtcatccgcgcgtggatttattgtcgttaacatcctggcagatgctctatgcggcgctggtgatgagtgtggtcgctttactggtgccgcaacgtgaaattgactggcagcccactgtgttctgggctctggcctacagtgcgattctggcgacggcgttggcgtggagcttatggctgtttgtgctgaaaaacttgcctgccagtattgccagcttaagcacactggccgttcccgtttgcggcgtactcttttcctggtggctgctcggtgagaatccgggggccgttgaangtagcggtattgtgctgattgtgctggcactggcgctggtgagccgtaagaaaaaagaagccgttagtgtaaaaaggatctgaattttttcttcatgtggggcnnnngcntatttaacaaaataacgataatgccccaccatgcgccagctaaacagcacatcttcttcctgcgcacctgcgccaatgttatgtatcaccagcggcgtaccgtcgcgggcgaagccatctgaaaccaccccaatatgtgccagcccgttatctaatcgccaggagacaatatcgcccgcttgatagtcactggggtccttgctgatggggcgtgttttatcgtggcgggtaaaccaggtttccagattaggcacccgacggtgatcgatgttgctgtccgggcgctttaactgccatttttgcgggtactcggcaaaattcttcgccatatcttcgtgcaccagtttctgcaaatcgaccttctggctgcgcaatgcacggatcaccacatcggaacataccccgcgttcttgcgggacatcaccgccaggataggtaagctgcacatacgccggatcgtaaaatagcgtgctgccgatttgctgtctggcaccgtctgcgatggcaaggttggtattgncctggatttgtaccacggttggtggaatggcgggagattttaaggagtagctggtaaatgccgttagcaggctgaccagcgccagtgaagctttcatctgtttcgtccgtgaaaataagagtcacagattcgaccttccgggctaacgattgttctgtagagaaaatgtccagaagcggataaaaaattcctgaacaacgtgggagtttcagattactggcacagagtgccggatgcggcgtgaacgtcttatctggcctaaaaagcacgcaaattcaatatattgcagagattgcgtaggcctgataagcgtagcgcatcaggcaattttgcgttcaaactcccggacaagccgggagtttggagtaggttattcccactcttgcaggaaacgctgaccgtactggtcggctaccagcagagcggcgtaaacctgatctggcgtcgcgccgccaggcatgttgtggatggtttcaccttctgcacatgccgcttctgccacaattcgcattttcgccgggacatcttctttaatatccagttgagcgagagttattggcaaacctaccgcatggctaagcgcagctacggtttcgatttcctcaaccggcgagttttccagtaccagctgcgtcagtgtaccaaatgccactttttcaccgtgataatagtgatgggcatcaggaatggcagtcaggccattatgcaccgcgtgcgctgccgccagaccaccgctttcaaagccaacaccgcttaaataagtgttcgcttcaatcacgcgttccagtgccggagtcactacatgctgttcggcggcgagcatcgctttttcgccttcttccagcaaggtgttgtagcacagttcagccagcgccagcgccgcctgagtgcacttgccgcccgccatggtggtcgcaccgctacgagagcaggcacgcgcttcaaaccaggtcgccagcgcatcgccgatacccgccgctaacagacgcgcaggtgcgcccgcgacgattttagtatcgacaatcaccatattcgggttatttggcagcagcagatagcggtcaaattcaccttcgtcagtgtagataacggaaagagcgctacaaggtgcgtcggttgaagcaatggtcggggcaatggcgaccggaacacccatgaaatgtgccagtgctttggctgtatcgagggtttttccgccaccgataccgagaattgcgccacactgcgcagtctccgcgatgccacgcagacggtcgatctcattttgcgaacattcaccgccaaacggcgcaatttctactaccagtccagcatctttaaagcttttctcgacagtggattgagcaaaacctaaaacaaatttgtcacccaccactaaccagcgttctgccagcggcttcaggtattcgcccagacgattaatcacatcagcgccctggatgtatttacccggtgattgaataatgcggtccataattgctcctttagagatgagtagtgccaaatgcggcattccagtcgtgttcgaacttctctatagctgactctaccgcaggggtgttgagcatttgttgcgctacatctaagggcagggtgatggattcacatcctgccagtaaacagtccagcgcctgacgcggcgttttaaagctnnnngccagcaccatgctttctggtgcgtgcatttctaacagcgcttgcagctcctgaaccgtacgaatgccgtccccgccctgggcatccacgcggttaacatacggagcaacgtattttgcccctgccagtgcggctaataacccttgtgcggcgctatatacagcagtgccaagtgtagtaataccctcttttttcagtattttaattgctgccagaccttcggaagtcaccgggattttcaccacaatgcccggaatggcatcgcgcagacgcttcgcttcttccaccatcccctgcgcgtcgcggctcatggtctgagcaaacagaatgccctcatcaccaatcgctttttgcagacgcggcagcacttcccatatggactccttgctggcagcgataatgctcgggttagttgtcaccccggcaatcgggaatatgtgtgccagacgttcgacttctgcgacgttagcggtgtccagatacagttccatgatgtttccttttacagttccagttcatgttgcagcaggctggcgatagcgtcggcagaggcggcgttaaccagcgcgttacggaattcttcgtgcatgatgcggcgagcgaggcgcgagaaaatgcgcatatgctgatcgcccgcagcgtgtttgttcagggttaacataatgatgaattgcgcttcatcatcgccccagcgcaccggcgcttgcagacgcgntacgctgatggtggattgctcaatgtgttctgatttgctgtggggaatggcaaaactaaagcccagaccggtagagaaaacggcctcgcgcgcccacaagtcggcttccagtttacgcggatagcggcagcggcccgccagcagcaggttatcggtcatgcctttgagcacttcttctttgctgcnccagtcgctttccagtgtgatgcactcggcggtgaccagcggtgcgtcttgttgggtcatgcggaattgcgccagcaggtgttccacttccagcgaagtacggcaggccattgcctggttgagcaacttgcggcactcacggctatcaagttgcgccatccgcgctttcnccgccggaattgatggtgcgctcatgctgagttcatccagccctaagccgaccagcaacggcagcacggaacctttcgctcccagctcaccgcacagaccaatccatttgccctggcgatgcaccgcttgcacggcgtaatcgagcgcccgcaagaatgccggattcaggctgttgtagtgacgagtaaccttagcgttatcgcgatccactgccagcagatattgcgtcaggtcattactaccaatactaaagaaatcaatctcttcgcagcattgatcgatgatgaacatcaccgacggcacttccagcatgatgccgagctggatcttctcatcaaacggaatgtgttcgttacgcagttgctgtttggcttccgccagtttttctttcacccataagatctcttccattgaggagatcatcgggatcatgattttcaggctgccgtgagcagaggcacggaggatcgaccgtagttgtgtggtgaacagcgaggcgtattcttcataaatacgcaccgcgcgataaccgaggaacgggttagcttctgccggaatgttcagataatcaacgggtttgtcaccgccaatatccatagtgcgcacaataatgctgcgtccgttggcggactccagcgcttgacaaaaaatgttgtacaactcgctttcgcccggtgcgctggtgcgatccatatagagcatttcagtgcggaacaaaccgacgccttccgcaccattgccgaatgcggcctgcgcttccacggagtgagcgatgttagcggcaatttcaatgcggataccgtcagcggtacgggcttgttgggtcagccagacacgctgttgctcacgcagggcgtcctgtacgcgggcttcttgctgataataacgagctacggcttcccctggctcaaccacaatcgccccggcgttgccgtcgatataaatcgtttgatgctgccacggagtaagggcatcaatatctacaccaaccagtgtcggaatgttgaacgaacgggcaagaattacggtatgtgaggtggtgccgccacttttcagtaacagacctttgaggtgatttttatccagttcgaggaactggctgggggttagttcatcagccatacaaatggcgggctgcgtcagtttgcccggtgccgggaagcgttgctcaccgtagatttgctgaagcagctggaagcagacatcgcgtacgtccagggcacgttcttgcaggtagctgctgctggaacgggaaaactcttcacaaaagtgattcgcactggcgacaatcgcttcggcgcagcttaatccggcgctgacgcctgccagtaaatgttcgtgcagggaagtatcgccagccagggatcggtgcgcttccagaatcgcgctggtggcaccgtcgctatccagcagacgaaactcaatgtttttcagtaccagcgtcaggccgttttccagtgcggattgctcggcgtcaacgtctttggctgcgggaagattacccagcgcattgagatctaaagaagagatcggcgtcagaatgccgcctgcgctaccgctgcacacggtgcgggcgcggataatttgcggattcagattggtcagtgaaaccggcagtggttccagttcgtcagatttaacttccgccagcggcgcatcgcagtgggggaattcatcgcgcagccattggcttaaacgctggtgcgcttcctgttcgtcggccccggaaatcagtaactggcagttatcgcccgccagcgtgtcggtgccaatcagcgcaagggcgcttttggcgttgcccttgcggtcagtgcgcaggttatgccactcaatttgtgatgaaaaagtattacacagcgtttcaacgtggcttgccggacgtgcatgtacgccgttaggtagctcacaaataaattccacaatcagggccattgcctctctcccggtacggttttctgtttacaggataagagcgcacggcaacggcctgccatgtgacaaatctgccaaaagctggacaaatgtaatgtaaccgtcaatttgcgacgcgtctcacaagacgccgttttgcggcatgcttccggattatcgcaagttatgaggcggatcgcatttttgtactgatattacaaaagtccagtaaatggcctttttatccactgtttgctccgcctgcgattgcctattgtttcctccatcaaaaatatggacatgggctttcgcaagcccgggagcagcttatgaatgagttggtgcagatcctgaaaaatacccgtcagcatttaatgacgggcgtttcacacatgattcccttcgtggtatcgggcggtattttgctggcggtttccgtcatgttgtatggcaaaggcgcagtgccggatgccgtagccgatccgaatctgaaaaaactgtttgatatcggcgttgcaggtttgacgctgatggtgcctttcctcgccgcttacatcggttactccattgcagagcgttctgcgctggctccgtgcgctatcggtgcctgggttggtaacagctttggtgcgggcttctttggtgcactgatcgccgggattatcggcggcatcgtggtgcattacctgaagaaaattccggtgcataaagttctgcgctcggtgatgcccatcttcatcattccgatcgtcggcacactgattaccgcaggcatcatgatgtggggtctgggcgagcctgtaggggcgttgaccaacagcctgactcagtggcttcaggggatgcagcagggcagcattgttatgctggcggtgatcatgggtctgatgctggcgttcgatatgggcggtccggttaacaaagtggcctatgccttcatgctgatttgcgttgctcagggtgtttataccgtggtggccattgctgccgtgggtatttgtatcccgccgctggggatggggctggcgacgctgattggtcgtaaaaatttctccgcagaagagcgcgaaaccggtaaagcggcgctggtgatggggtgcgttggggttactgaaggggcgattcctttcgccgcagccgatccgttacgtgtaattccttccatcatggttggttcagtttgtggtgcagtaactgcggcgctggtcggtgcgcagtgctatgcaggctggggtggtctgattgtgctgccggtggttgaaggtaagttgggttatatcgcagcagtggctgtcggggcggttgtgacggcagtctgcgtgaacgtgctgaaaagtctggcgcgtaaaaatggatcttctactgatgaaaaagaagacgacctggatttggattttgaaattaattaattgaggaacgagccatgacgaaaattattgcagtaaccgcgtgtccatctggtgttgcccatacttatatggctgcagaggcgctggaaagtgccgcgaaagcgaaaggctgggaagtgaaagtagaaacccagggctcgattggtctggaaaacgaactgactgcggaagacgtggcgagcgccgatatggtgattctgactaaagatatcggcatcaagtttgaagagcgttttgctggcaagaccatcgtgcgcgtcaacatcagcgatgcggtaaaacgtgctgatgccattatgagcaaaattgaagctcacctggcgcaaaccgcttaagttcttctcccgctcgcaagggcgggttcgctttcccacaggagttcctcatgacgaatcgtatctctcgcctcaaaactgcactgtttgccaatacccgtgaaatctcgctggagcgtgcgctgctttataccgccagccatcggcaaaccgaaggcgaaccggtgatattgcgccgggcgaaagcaacagcgtatatccttgaacatgttgaaatttcgattcgtgatgaagaactgattgccggtaaccgcaccgtaaaaccgcgcgccgggattatgtcgccggaaatggacccttactggctgctgaaagagctgggtcaattcccgacgcgtccgcaggaccgttttgctatcagcgaagaagataaacgtatctaccgcgaagagttgttcccgtactgggaaaaacgttcgatgaaagatttcatcaacgggcagatgacggatgaagtaaaagccgcgactagcacgcagattttcagcatcaaccagacggataaaggccaggggcacattattattgattacccgcgcctgctgaatcacgggctgggggagctggtggcacagatgcagcaacattgtcagcaacagccggagaatcacttttatcaggcagcgctgttactgctcgaagcctcgcagaaacacattttgcgttacgccgaactggcggaaacgatggcggcaagctgcactgatgcccagcgtcgcgaagaactgttgactattgcggagatctcccgccataacgccgaacataaaccgcagacgttctggcaggcgtgccagttattctggtacatgaacatcattctgcaatacgaatccaacgccagttcgctgtctttagggcgcttcgaccagtatatgttgccgttctatcaggcatctttaacccagggcgaagatccggcgttcctgaaagaactgctcgaatctttatgggtgaaatgcaacgacattgtgctgttgcgctccaccagcagcgcgcgttatttcgcaggtttcccgactggctataccgcactgctcggcgggttaaccgagaacggacgtagcgcggtgaacgtgctttcgttcctctgcctcgatgcctatcaaagcgtacaattaccgcaaccgaacctaggggtgcgcactaacgccttgatcgacacgccgttcctgatgaaaaccgcagaaaccattcgcctcggcaccggtattccgcaaatctttaacgatgaagtggtggtgccagcgttcctcaaccgtggcgtttcgctggaagatgcgcgcgactattccgtagtgggctgtgtggaattatctattcccggcagaacctacggcttgcatgacatcgcgatgtttaatctgctgaaagtgatggaaatctgcctgcatgaaaatgaaggcaatgctgcgctgacttatgaaggtttactggagcagatccgcgccaagatcagccactacatcaccctgatggttgagggcagcaatatttgtgatatcggccatcgcgactgggcacctgtaccgctgctctcgtcttttatcagcgattgtctggaaaaaggtcgcgatattaccgatggcggcgcgcgttataacttctccggcgtacagggaattggtatcgccaacctgagcgattctctccatgcgttgaaagggatggtttttgatcaacagcgtttaagttttgacgaattgctgtcggtattaaaagccaactttgcaacgccagaaggcgaaaaagtccgcgctcgcttaattaaccgctttgagaaatacggtaacgatatcgacgaggtggataacattagcgccgaactgttgcgccactactgcaaagaagtggaaaaataccagaacccgcgcggcggttacttcacgccgggatcgtataccgtttctgctcacgtcccgttgggatcggtggttggcgcgacgccagacggtcgttttgccggagaacagttggcagacggcggcttgtcacccatgctgggccaggacgcacaagggccaacagcggtactgaagtcagtcagtaagctcgataacacgctgctgtctaacggtacgttgctgaacgtgaaattcactccggcgaccctggaaggtgaagcgggattacgcaaactggccgacttcttacgggcgtttacccagcttaagttgcagcatattcagtttaacgtggtgaacgccgacacgttgcgggaagcgcaacagcgcccacaagattatgccgggctggtggtgcgcgttgccggatacagcgccttctttgtcgaactgtcgaaggagatccaggatgacatcatccgccggacagcgcatcagctgtaacgttgtggaaacgcgccgcaatgatgtggcgcgcattttcaacattcagcgttattcactgaatgacggcgagggcattcgtacggtggtcttttttaaaggctgtccgcatctttgcccgtggtgtgctaatccggagtcgatctccggcaaaatccagacggtacgcagagaggcgaaatgtctgcactgtgcgaaatgtttgcgtgatgcggatgaatgcccctccggggcgtttgaacggattggtcgcgatatcagccttgacgcgctggaacgggaagtgatgaaagatgacattttctttcgcacgtccggcggcggcgtcacgctttctggcggcgaagtgttaatgcaggcggagtttgctacccgttttttacagcggctgcggttgtggggcgtgtcatgcgccattgaaactgccggagacgcgccagccagcaagctgttaccgctggcgaaattgtgcgatgaagtgttgttcgatttaaaaattatggacgcgactcaggcgcgggatgtggtgaagatgaacctgccacgcgtgctggagaatctgcgtttgctggtgagtgagggcgtcaacgtgatcccgcgtttaccgctgatccctggtttcacgctcagccgggagaatatgcagcaggcgctggatgtactgatcccgctgaaaatcaggcagatccatctgttaccgtttcatcagtacggcgaaccgaaataccgcctgctggggaaaacatggtcgatgaaagaggtgcctgcgccgtcgtcagccgatgtgacaacgatgcgcgaaatggcagaacgggccggatttcaggttaccgtgggaggttaaaatggcatacctggtggcagtaaccgcctgcgtaagcggcgtggcgcatacatatatggcggcggaacggctggaaaagttgtgcctgttagagaagtggggagtcagcattgaaactcagggcgcgctgggaacggagaatcgtttagcggacgaggatatccgtcgggcggatgttgntctgttgattacggatatcgagcttgccggtgccgagcgatttgaacattgccgctatgtgcaatgcagcatctacgcattcctgcgtgagccgcagcgggtaatgagcgcggtgcgcaaagtgctttctgcgccgcagcaaacccatcttattctggagtagtcggtttttctgtcagttggctgtggtactgccggcgatattccgacggcgagcgttcggtgtttttacgaaacagacggcagaagtagttgctgtcgacaaagccgcaggcgtgcgccacttcttttaccttcaggtcatagcctttcaataacgtcttagcgtgctccagtcgcgtgtgattcaggtattcgttaaaaccaatggcccccgttttttgaaacaggtgcgagagatagtttggtgaaatatagaatgcctgtgcgacagattcgcgggtaagcgcggaggcatagcgttcgtcgatataatcgcgaatagcttcgaatagtgcctggctgcgtgaggcggtctggatttggctgccaagcaaatcgcggcagtggctaagcaggctggcgacgataagccttgccgtttgctgctcctgcggctgcatttgcatttcattgagcgtttgtagcagaaaagaacctatgcgtgggccgcgtcgggcgacgtgttgcttcgccagattttgatattgtttgccatcccattgcacgacgctgaagccgagttgctgtttgccaaacagcacgctaaaggtagtagcaggggcttgccattgtggaaaattccagccaccagcggcaacgtacagcacatcgccgggaactaacgttgctccagcgccggtatcaacaaactcaccttccagcacaatttccagccgtggaaaatcgacctgatacgcaagatcgggcaccgggccgttactgctggcaaagtaaatctggcgcagggacagcgggccgttgatcaggcgggagagcagatagctgacgtcgtgatacatgttattcccttaggtatggagacgggaaaacagtaactggcattattaaaaaaggccacctgaaaagtgtggcctgaggggagttcgatgtaaacattgcggcagttgtattgccggatgtggcgtaaacgccttatccagtctaccgccgcgatctgtaggccggataagacgcgtcaagcgtcgcatccggcaaatagcgcctggctgataattactgattacctacctggtcgccatacggcagcgtgtcgtaatcgatcagcgcgtttttcttgtacgggttaccaatccagcgggtagtttctttgaactgcggattcaccactgaacgggttggatcgtaaccgtcgtaagataagcccgctaaatctgaccaggtgtggatcagttccgcaaggctgtatttacgatcaacatcctgcgagaaatcacgcggatgagtcgcttgccatttttccgacgtccacagcaggaacggaatggtgtacatatgacgcgtcgggttgtcctcattacgcccctgggttttatgaggcggcgtgtcgtaaacctcttcaccgtggtcagagaagtaaaccaggaaaccgttcgggtctgctgctttaaagtctttaatcaggctggcaaccacatgatcgttatacaggttagcgttgtcataatcgttatatgactccagctcttccgcgtttaatcccggcggaacatgatcggtattgccatcaaacttgccctgattttccgggtagcggtatttgtatttgatatgcgtacccagcagatgaacgatgatcagtttcttcggcgcagggtccttcagcacttcctggaacggcttcagcacgttagtgtcgtattcacgcncactctgcgtacgttgctggttcatgtagtactgcttgtcggtctggcgcgaaaataccgtcagcatggtattgcgggcggtcatcgtctgctggttggtgatccagaaggttttataacccgcctgtttcatcatgttcatcagcgacggctgcgtcagatacagatccgggttcttttcattggcaaaggtcagcgcctgttgcaggatttcaatggtgtacggacgagacgtaactacgttattaaacacggtcagattcggatcggttttatgcagcgcattcagctccggcgtggtttcacgcggataaccgtacagactcatgcgtccacgctgggttgactcgccaatcaccagcactaaggtgcgcggttcgttacccgattcatctttgaaattagccagcggcggcaaggcattattttcattcagtagctttgttagcgagtttagttgctgacgatactgataatagccggtcaggaattgccacggtgcggcaggctccatacgcgaggccaggttatccaacgttttctcaaacggcttgtttttgataaacatattcatggcgatcggatgcagaatcaagccataaagcagggcaaaagagacaacataacgccacggctttggaatatagaccgggcgcaggcgtgtccacagcagaactgccaccgccgtataggccagcgcgataagcacaattttcaggctgaaatactggcttaaatactcgctggcttcgttggtgttggtttcgaacatcacaaacagaacgctctgcgagaactcctgaccgtagatgacgtagtagcacagcgccgccagagaggccgcccatagcaccacgccgatcactgcggcaataattttgatccgcttcggaaagaggaataccggaattaaccacagcgagctgaataacagcgagtcgcgaatgccgttggtgccactataaccactgatgtaaataatggcctgtagcagagtagagaaaaaccaaaagtagagcaatgcccaacccagggctttccagctaaaaagaggtttagcctggacttctgtggaatgcatagtaagaacctgtcttgaaaaaaatatcgccgaatttaccgacaattccttaaggatatctgaagggatatccagaatttgaataaaatgcagacagaaatatattgaaaacgagggtgttagaacagaagtatttcagaaaaccctcgcgcaaaagcacgagggtttgtaggagaggaagattagccggtattacgcatacctgccgcaatcccggcaatagtgaccattaacgcctgctcgacgcgaggatccggttcctggccttctttttctgcctggcgggagcggtgcagcaactcggcttgcaatacgttcagcgggtcggtgtaaatattccgtagctgaatagactctgcaatccacggcagatcggccatcagatgggaatcgttggcaatcgccagcaccactttgatgtcttcttcttgcagattgcgtaactctttacctaacggccacagtgttttgtctaccaggcgttggtcatagtattccgccagccacaggtctgctttggcgaagaccatctccagcatgccgagacgcgtcgagaagaatggccaatcgcggcacatagcctccagctcgctctgtttgccatcttcgaccactttttgcagcgccgtacctgcacccagccaggcggggagcatcagacggttttgcgtccaggcgaagatccacggaatggcgcgtagtgactcgacgccgccggttgggcgacgtttcgccggacgtgaacccaacggcagtttgcccagttcctgttccggcgtagcggagcggaagtaaggcacaaaatctttgttttcacgtacgtagccacggtagagatcgcaggagatgactgatagttcatccataatgcgacgccagctctctttcggctcaggtggtggcagcaggttggcttccagaatcgccccggtgtaaagcgacaggctgctgacggtgatttctggcagaccatatttaaagcggatcatctcgccctgttcagtcacgcgcaggccacctttcaggcttcctggcggttgtgacagcagcgccgcatgagcaggtgcgccgccgcgaccaatggaaccgccgcgaccgtggaacaacgtcagctcaatacccgctttttcgcaggttttgattaatgcatcctgtgcctgatattgcgcccaggacgctgccatcacgcccgcatcttttgctgagtcggaatagccaatcatcaccatctgtttgccctgaatcaggccgcgataccagtcgatattcagcaactgagtcatgacatcgttggcgttgttcaggtcatcgagagtttcaaacagcggagcaaccggcatcgcaaacccgatacccgcttctttcagcagcaggtggacagccagcacgtcggacggcgttttcgccatcgagatcacgtaggcggcaatggagccttgcggtgcttcggcaatcacctggcaggtatcgagcacttcgcgcgtttcggcgcttggttgccagttgcgcggcagaagcggacgtttggagttcagttcgcggatcaggaacgcctgtttgtcggcctctgaccagctttcgtagtcgccgataccgaggtagcgggtcagctcgcccagcgcttcggtatgacgcgtgctctcctgacggatatcaatacggaccagcggtacgccgaaacatttcacgcggcgcagggtgtcgagcagatcgccgttggcgataatacccatgccacacgcctgaagtgactggtagcaagcgtagagcggttcccacagttcttcgttttgtgtcagcnggccttctggttttggcagttcttcgcctttcaggcgcgcttccagccatgcctgtgtcgccatcaggcgagaacgcaggtttttcatcagatagcgatacggttctgcggcaccttcttcgccaaccagcgccagcagttcaggggtcgcttcaaccatcgacagttcagaaaccagaacctgaatatctttcaggaacagatcggtggctttccagcggctgagcagcaggacgtggcgggtgatatcggcagtgacgttcgggttgccgtcgcggtcaccgcccatccacgaggtaaaacgtaccggaacaaattcgacgggcagtttgtagccgaggttctcttccagttgttcgttcagttcgcgcaggtaattcggtacgccttgccacaggctgttttctactacggcaaagccccatttggcttcatctaccgggcttggacgcagcttacggatttcatcggtatgccatgactgggcgatcaactggcgcaggcgacgcatcagctggttgtgttcgtagtcagcgatatctttgttatcgagctgttttaagcaggcgttcacttccaccattttgtggatcagtgtacgacgggtaatttcggttgggtgagccgtgaggaccagttccagcgacagcgattccactgcttttttgatggtgtcttcgctcagttccggctggtttttcagtttacgcagggtgcgggcgatcacttccgggttgctggcagcttcgcctttcggcgaaatgctgtggtattgctcggcggtgttggccaggttcaggaactgactaaacgcacgcgcaacgggcagcagctcgtcgttcgacaaattttgtaaggtggtgagtaactcctggcggttagcatcattgccagcgcgtgaagatttggacaacttacggatagtttctacgcgttcaagaatgtgttctcccaacgcatccttgatggtttctcccagcactttgccgagcatacagacattactacgcaatgcggaatattgttcgttcatattaccccagacaccccatcttatcgtttgatagccctgtatccttcacgtcgcattggcgcgaatatgctcgggctttgcttttcgtcgtcttttataaagccacgtaaaagcggtgacgtcaaatgctgcgaaatcgcttcagcaaacgaataaatagcaggaatttacgtcattaaattcacgacgctttaaataagcgtaacttatgggaatgttaaaaaatcgcctcaagtaacaccaaaggtgtaggtcggataagatgtgcaagcatcgcatccgacattattgcggcactggagtttggcaacagtgccggatgcggcgcaagcgccttattcggcctacgttttaatgccagcaaaaatggtgaatgacctgggttatcagttcgcgggtgggcttgataaaccgtgtttccagatattcatcaggctgatgagcctgattaattgagccaggccccagaaccagcgtcgggcataacgtttgaataaacggcgcttcggtacagtaattcaccacttcggtttttgctccgagcaatttctcaaccacttcaaccagttgatgattcggtgggcattcatagccagggatcggcggatgcagctcgtcgaccgtcagacgacccggccagcgttcgctcaccggagccaatgcatcgttgagcaaaccattaagttcattgagtgtcatgccaggcagcggacgaatatccatatgcaactcacaccaagcgcaaatacggttagaagcgtcgccaccgtgaatatgcccgaggttgagcgtagggtatggcacggtaaacgcttcgtagtgataacgttctttcaggttatcgcgcaattgcanaatatgcccgatggcgtcgtgcattagttctatagcgttaactccgcgtgctggatcgctggagtgccccgactggccctgaatacggatggcgttagagatatgacctttatgtgcgcgtaccggttgtagtgacgtcggttcgccaatgatggcgcaatccgggcgcagggcggtagtttcggcaaaataacgcgctccggccatactggtttcttcatcagcagtcgccagaatgtagagcggttttttcagtttcgtgacgtngacatcgcgtagcgcatcaaggataaacgcaaaaaagcctttcatgtcggcggtgcctaagccgtaaagcttgccgtcatgctccgtcagtgtaaacggatcgcgcgtccagcgaccgtcatcaaatggcaccgtatcggtatgccccgccagcaacaagccgccagccccctgtccggtacttgccagcatattaaatttgttgcgagttcctggtacaggctgcacttccacattgaagcctaaatctttaaaccagtccgccagcagagtgattaaatctgcattgctttgatcgagtgcctcttccgtggcgcttattgaaggtgtggcaatcagagcacggtaaatctcgataaatggcggtaatttgtttttcattgttgacacacctctggtcatgatagtatcaatattcatgcagtatttatgaataaaaatacactaacgttgagcgtaataaaacccaccagccgtaaggtgaatgttttacgtttaacctggcaaccagacataagaaggtgaatagccccgatgttgaatacgctgattgtgggtgccagcggctacgctggcgcagagctagtgacctgtgtaaatcgccatccgcatatgaacataaccgctttgactgtttcagcgcaaagcaatgatgcgggaaagttaatctccgatttgcatccgcagctaaaaggcatcgttgatctgccgttgcagccgatgccggatatcagcgagtttagccctggggtggacgtggtgtttctcgccaccgcccatgaagttagccacgatttagcgccgcagtttcttgacgcgggctgcgtggtgttcgacctttccggcgcgtttcgtgttaacgacgccaccttctatgaaaaatattacggctttacccatcaatacccggaactgctggaacaggcagcctacggtctggcggagtggtgcggtaataaattaaaagaagcgaatttgattgcggtgccaggctgttatccgacggcagcacagttggcgctgaaaccgttgattgatgccgatcttcttgacctcaatcagtggccggtgatcaacgccaccagcggcgtgagcggtgcaggacgtaaggcagcgatttcaaatagtttttgtgaagttagcctgcaaccgtatggcgtctttacccatcgccatcaaccagagatcgccacacacctcggtgctgacgttatcttcaccccgcatctgggcaatttcccgcgcggcattctcgaaaccattacctgccgcctgaaaccgggtgtgacccaggcgcaagtggcgcaagcgttacagcaggcgtatgcccataaaccgctggtgcggctgtatgacaaaggcgttccggcgctgaaaaatgtcgttgggctaccattttgcgatatcgggtttgccgttcagggcgaacatctgattattgtggcgaccgaagacaacttactgaaaggcgcggcggcacaagcggtacagtgcgccaatattcgtttcggctatgcggaaacgcagtctcttatttaagggtgcaatgatgaatccattaattatcaaactgggtggcgtactgctggatagtgaagaggcgctggaacgtctgtttagcgcactggtgaattatcgtgagtcacatcagcgtccgctggtgattgtgcacggcggcggttgcgtggtggatgagctgatgaaagggctgaatctgccggtgaaaaagaaaaatggcctgcgggtgacgcctgctgatcagattgacattatcaccggagcactggcgggaacggcaaataaaaccctgttggcatgggcgaagaaacatcagattgcggccgtaggtttgtttctcggtgacggcgacagcgtcaaagtgacccagcttgatgaagagttaggtcatgttggactggcgcagccaggttcgcctaagcttatcaactccttgctggagaacggttatctgccggtggtcagctccattggcgtaacagacgaagggcaactgatgaacgtcaatgccgaccaggcggcaacggcgctggcggcaacgctgggcgcggatctgattttgctctccgacgtcagtggcattctcgacggcaaagggcaacgcattgccgaaatgaccgccgcgaaagcagaacaactgattgagcagggcattattactgacggcatgatagtgaaagtgaacgcggcgctggatgctgcgcgcacgttgggccgtccggtagatatcgcctcctggcgtcatgcggagcagcttccggcactgtttaacggtatgccgatgggtacgcggattttagcttaagttttgttggccggaggcgcagctttccggcattgaatttcaaaataaggaaacagagttatggcactttggggcgggcgttttacccaggcagcagatcaacggttcaaacaattcaacgactcactgcgctttgattaccgtctggcggagcaggatattgttggctctgtggcctggtccaaagccctggtcacggtcggcgtgttaaccgcagaagagcaggcgcaactggaagaggcgctgaacgtgctgctggaagatgttcgcgccaggccacaacaaatccttgaaagcgacgccgaagatatccatagctgggtggaaggcaaactgatcgacaaagtgggccagttaggcaaaaagctgcataccgggcgtagtcgtaatgatcaggtagcgactgacctgaaactgtggtgcaaagataccgttagtgagttactgacggctaaccggcagctgcaatcggcgctggtggaaaccgcacaaaacaatcaggacgcggtcatgccaggttacactcacctgcaacgcgcccagccggtgacgttcgcgcactggtgcctggcctatgttgagatgctggcgcgtgatgaaagccgtttgcaggatgcgcttaagcgtctggatgtcagcccgttaggttgtggcgcgctggcgggaacggcttatgaaatcgaccgtgaacagttagcgggctggctgggatttgcttcagcaacccgtaacagtctcgacagcgtttctgaccgtgaccacgtgctggaactgctttctgctgccgctatcggcatggtgcatctgtcgcgttttgctgaagatctgattttctttaacaccggcgaagcggggtttgtggagctttctgaccgcgtgacttccggttcatcattaatgccgcagaagaaaaacccggatgcgctggagctgattcgcggtaaatgcggtcgggtgcagggcgcgttaaccggcatgatgatgacgctgaaaggtttgccgctggcttacaacaaagatatgcaggaagacaaagaaggtctgttcgacgcgctcgatacctggttggactgcctgcatatggcggcgctggtgctggacggcattcaggtgaaacgcccgcgttgccaggaagcggcgcaacagggttacgcgaacgccactgaactggcggattatctggtggcgaaaggtgtgccgttccgcgaggcacaccatattgtgggtgaagctgtggtggaagccattcgtcagggcaaaccgctggaggagctgccgctcaccgagttgcagaaatttagtccggtgattggtgaagatgtctatccgattctgtcgctgcaatcgtgcctcgacaagcgtgcggcaaaaggcggcgtctcaccacagcaggtggcgcaggcgattgcttttgcaagggcgcggttggggtaagaacatttatatgtacaaatttgagcctggcttatcgccgggcttttttatggcaaaaaaaagcggatcctggagatccgcaaaagttcacgttggctttagttattcgagttgagaaactctcgaaacgggcagtgacttcaagggttaaaagaggtgccgctccgtttctgtgagcaattatcagtcagaatgcttgatagggataatcgttcattgctattctacctatcgccatgaactatcgtggcgatggaggatggataatgaatattcgtgatcttgagtacctggtggcattggctgaacaccgccattttcggcgtgcggcagattcctgccacgttagccagccgacgcttagcgggcaaattcgtaagctggaagatgagctgggcgtgatgttgctggagcggaccagccgtaaagtgttgttcacccaggcgggaatgctgctggtggatcaggcgcgtaccgtgctgcgtgaggtgaaagtccttaaagagatggcaagccagcagggcgagatgatgtccggaccgctgcatattggtttgattcccacggttggaccgtacctgctaccgcatattatcccgatgctgcaccagacctttccaaagctggaaatgtatctgcatgaagcacagacccaccagttactggcgcaactggacagcggcaaactcgattgcgtgatcctcgcgctggtgaaagagagcgaagcattcattgaagtgccgttgtttgatgagccaatgttgctggctatctatgaagaccacccgtgggcgaaccgcgaatgcgtaccgatggccgatctggcaggggaaaaactgctgatgctggaagatggtcactgtttgcgcgatcaggcaatgggtttttgctttgaagccggggcggatgaagatacacacttccgcgcgaccagcctggagacgctgcgcaacatggtggcggcaggtagcgggatcactttactgccagcgctggctgtgccgccggagcgcaaacgcgatggggttgtttatctgccgtgcattaagccggaaccacgccgcactattggcctggtttatcgtcctggctcaccgctgcgcagccgctatgagcagctggcagaggccatccgcgcaagaatggatggccatttcgataaagtgttaaaacaggcggtttaaaccgtttaacgcagctacccgataggcttccgccatcgtcgggtagttaaaggtggtgttgacgaagtactcaatagtgttgccgccacctttctgttccataatcgcctgaccgatatgaataatttcggcagcgcgctcgccaaagcagtgaatgcccagaatctcttttgtttcccgatggaacaaaattttcagcgtgcccacgttcatgccgacgatttgtgcacgtgccagatgtttgaactgggcgcggcccacttcatatggcactttcatcgcggtcagctgctgttcggttttgcccacagagctgatttccgggatggtgtaaatgccggtagggatatcttcaatcagatgcgcggtggcttcgccttttaccagcgcctgcgcggcaatgcgcccctggtcataggccgctgatgccaggctcggataaccaatcacgtcgcccaccgcgtaaacgtgcggctgtgcggtctgatacatgctgttgaccttcagctgtccgcgactgtcagtttccagcccaatgttctgtaacgccagcgaatcggtattaccggtacgaccgttggcatagagcaggcagtcagctttcagttttttacccgacttcagatgcatgatcacaccgtcgtcacagccttcgatcttctcgtactcttcgttgtgacgaatcactacgccactgttccagaagtgataggagagagaatctgacatctcttgatcgagaaatgccagcaggcgatcgcgggtgttgatcagatccacttttacatccataccgcggaagatcgacgcatattcacagccgatcactccagcaccatagataagtacatggcgcggttcgtggtgcatgctgagaattgagtcgctgtcgtaaatgcgtggatgggtgaaatcaacatctgttggatgatatggacgagagccgcaggcaataacaaatttttcagcggttagtgtttcaacgctgccgtccgggcaatccagcgccaacgtatgctcgtcaacaaagcgagcgttcccctgcaatatttcacagtgattacgttcgtaaaatccctgacgcatgcgcgtttgttgattaatcacgttatcggcatggttaaggatatcggcaaaagaagagcggagcagtcgggaatggtcgctgtatagtgggttttgattgaattctataatgcggctgacggcgtgacggagagctttcgacgggatggtgccccagtgggtgcaaccgccgccaacattttgataacgctcgataactgcgacgcgcgcaccttgcttaaccaggcccattgcagcgccttcgccgccggggccggaacctattactatggcatcgtaatcgtaggaatgtggcatggtagggcttacctgttcttatacataaaagcaacagaatggtaacattttatcgcgggtaagccaattgatccccgtcattaatctggctatagcgtgagcggcctttgctttgtctgcctccttcttaacccatttattcactattaatcgctttttattatggctgatagttttatcttgccgaagcgtgcttttttgttattgtctttgtgaaatattcttataaaacaaanatataaatattttatattgatgagttatttgtatttacaccatcaataaaatccgttaattagcctgtttataagtgaataaaggaatagccgatgatcgaacactatattcgagggtttgaggaagaactgcgtgagatccgccatcagatccacgaaaacccggagctgggattacaagaatttaaaaccagtgctttggttgcggaaaagctgcgtcagtggggctatgaagtagagcaaggactggcgacgacggggatagtggccacgttaaaagtgggcgacggagagaaaagtattggcctgcgggcggatatggatgcgctgccgatttatgaaaatagtggcaagccctgggccagtaaacatcctggtttaatgcacgcctgcgggcatgacgggcataccaccatactgctgggggccgcgcgttattttgccgaaacccgccgttttaacggcacgttacgtcttatcttccagcctgcggaagagatgattaatggcggtgagatcatggttaaagaggggctttttgatcatttcccctgcgatgtcattttcggcatgcataacatgcccggtctgccggtgggtaagttttatttccagccaggggcactgatggcgtcaatggatcagttccatattacagttcgtggttgtggcggacacggtgcgatcccgcacaaagccatcgatccggtgctagttgccgcacatatcaccaccgcattacaaagcattgtgttacgcaatgtcgatccgctggaagcggcggtaattaccgtcggcagcattgttgcgggtgaggcggctaacgtcattcctgacagtgctgagatgaaaatcagcgtccgctctcttagccgcgatacccgacaacttcttctgacccgtattcctgctctggcacaagcccaggctgccagctttggcgctacggctgaggttacgcatgttaacggtacaccagtattagtaaatgacgaggagatggcgcgcttcgcctggcaggtggcgtgtaaaacgtttggtgaagatcgggccgagtttggcatcaagcctctgatgggcagtgaagatttctctttcatgctggaagcccaacccaaaggcggtttcctgttattcggtaatggcgatgtcggggaaggttcctgcatggtgcataacccgggttacgacttcaacgatgcaagtctggtcccggcaagcagctactggggcgcactggtagaagcctggctgcaataaataaaacaacacacaacaacactttttggcaaggaacatggaatgacggcgatcgtaaatgaaaccgtgagtgtgaagaaaaagcccagcggcaggcgggtgatttttgcctcggcgtttggcaatgcgctcgaattttttgattttggcgtttacaacttttttgtggtctatatcagcacgctattttttccgcccagtgcagataaaaacgtcgcgctactgctggcgtttgccactttcggcgtgagcttttttatgcgcccgctcggcggcattattgtgggggcctgggccgatcgtttcggacgcaaacccgcgatggtgttcaccattgcgctgatgagtcttggtacactgatgatcggcatcgcaccgacgtatgaaacggcgggctattggggaaccgcgacgctggtgctagcgcgtctaattcagggcgttgcggcaggaggcgaagtcggtgcctcaatgtctttgttggttgaatcagctccggcaaatcgtcgcggtttttacagcagttggtcactggcgactcaaggcctggcaacaacttttggaggtgttgtcgctttaggtttaagtgcatggctgccctttgcgaccggttcagaaatcgtcatggctgaatggggctggcgtgtgccgttttttattggcgtgttattagcgcctgtcggctgttggttgcgtttgagtctggaaaatgatgttcctgagccagcacataataagaaggccgcagccagcgaaagcgccttctccttacttatgcaacataaagcgactatcgctaacggtatcttgctcgctattggtagtacagtcgcaacctatatctccctcttttattacggtacatgggcggcgaagtatttaggaatgaaccaaaactattctcatgcagcgatgttactggcgggcgttattacgtttgtgggtgcgctgctggtggggatgttgtgcgattcggtcgggcgtaaaaagctgattttaatctcccgtgtgatggtgctgatctgtagctggccgtcattctggctgttggtgaattacccaagcccaggcatgttgctgacggtggttttcgtgatggtcagctttaccacgcttggcgctgtgccagtgatgttgttgatctctgaactgttgccgaaacggattcgggcattgggttttgcgctggtttatagcattggtgtggcaatctttggcggttttgctcaatatttcgctacgcaatccatcgtgttgctggatagtttgacggctccggcgtggtatctgggtggaggcacgttgctgtcgatgttggcgttgttgtacgtaaaagaaccggccaaagaattgcagtaaatatgttttattgcgttaccgttcattcacaatactggagcaatccagtatgttcattctctggtatagtgccagcagtacttttggcaaggattcagacatcgtgatgggcgtaagagcgcaacaaaaagaaaaaacccgccgttcgctggtggaagccgcatttagccaattaagtgctgaacgcagcttcgccagcctgagtttgcgtgaagtggcgcgtgaagcgggcattgctcccacntctttttatcggcatttccgagacgtagacgaactgggtctgaccatggttgatgagagcggtttaatgctacgccaactcatgcgccaggcgcgtcagcgtatcgccaaaggcgggagtgtgatccgcacctcggtctccacatttatggagttcatcggtaataatcctaacgccttccggttattattgcgggaacgctccggcacctccgctgcgtttcgtgccgccgttgcgcgtgaaattcagcacttcattgcggaacttgcggactatctggaactcgaaaaccatatgccgcgtgcgtttactgaagcgcaagccgaagcaatggtgacaantgtcttcagtgcgggtgccgaggcgttggacgtcggcgttgaacaacgtcggcaattagaagagngactggtactgcaactgcgaatgatttcgaaaggggcttattactggtatcgccgtgaacaagagaaaaccgcaattattccgggaaatgtgaaggacgagtaatgaaacaagcaaatcaagatagaggtacgctgctgctggcgttggttgctggcttatcgattaatggtactttcgcagcgctgtttagctccattgtgccattttctgtattcccgattatttccctggtgctgacggtttactgcctgcatcaacgttatcttaatcgcaccatgccggtaggcttgccgggtctggcagctgcctgttttattctcggcgtactgctgtacagcacggtagttcgtgcggaatatccggatatcggctctaacttcttcccggcagtactctccgtcattatggtgttctggattggcgcgaagatgcgtaaccgtaagcaggaagttgctgagtaatcggtatcatgccggatgctggcgcatccggcatgggttttacttcgcggtcagtaatacgccgcactccatatggtgcgtgtaggggaactgatcaaacagagccagacgttcgaccttgtgcgtctggcttaatgtttccagatttttgcataacgtttccggattgcaggagatatacagaatacgtggatacgcctgcaccattttctcggtttcactgtccagaccgctgcgaggtgggtcgacaaaaatggtttcgcactgataactctttaagtcgatcccttgcaggcggttaaactcgcgcacgccattcatcgcctgagtaaattcttctgccgccatacgaataatttgtacgttatcaatatggttagcggcaatgttgtattgcgcggcagcgactgatggcttggcgatttcggtggctaatacccgatcaaaattgcgcgccagcgctaatgagaagttaccgttgccgcagtacagctccagtaaatcgccttttgagcctttggttacgtccagcgcccattccagcatctgaatattcatcgccgcgttcggctgggtaaagctgttttctacctgacgatagatcatctctttccctgcgaccggcagacgctcgtcgatgtaatcttgatccagcgcgattttggttttcgttgcccgaccaatcagatgcacattcagattctgnnnnnncagtgcatcgcgcagggcttccgcttcctgacgccactcatcatccagctttttatggtacagcagggaaaccaccgcctgattactcagcgtggtgaggtaatcaatctggaacaacttgtggcgcagaacgggattattacgcacacccgcaatcatcgccgtcatcaactggttgatgagttcactggcggcggggaagctatccacccggatacggcttttggtttgttgatcgaaaatgatgtggtacaggtcatcgccatcgtgccagatgcggaactccgcacgcatccggtaatgactgaccggcgagcgaaacacttccggaaccaggtcagaaaacggtgccatcatactttgcaaacgtaccactttttcggctaactgcgcttcatactgttctgttggaaggtgttcgggggtcatgatgtatcctgaaaaattaaagtacgcggcgattgtagggattgctcatcagatgtccagatcttgatgaattcctatttgtgagctacgtctggacagtaacttgttacaacctgtagcatccacttgccggtcctgtgagttaatagggaatccagtgcgaatctggagctgacgcgcagcggtaaggaaaggtgcgatgattgcgttatgcggacactgccattcggtgggaagtcatcatctcttagtatcttagatacccctccaagcccgaagacctgccggccaacgtcgcatctggttctcatcatcgcgtaatattgatgaaacctgcggcatccttcttctattgtggatgctttacaatgattaaaaaagcttcgctgctgacggcgtgttctgtcacagccttttccgcttgggcacaggataccagcccggatactctcgtcgttactgctaaccgttttgaacagccgcgcagcactgtgcttgcaccaaccaccgttgtgacgcgtcaggatatcgaccgctggcagtcgacctcggttaatgatgtgctgcgccgtcttccgggcgtcgatatcacccaaaacggcggttcaggtcagctctcatctatttttattcgcggtacaaatgccagtcatgtgttggtgttaattgatggcgtacgcctgaatctggcggggntgagtggttctgccgaccttagccagttccctattgcgcttgtccagcgtgttgaatatatccgtgggccacgctccgccgtttatggttccgatgcaataggtggggtggtgaatatcatcacgacgcgcgatgaacccggaacggaaatttcagcagggtggggaagcaatagttatcaaaactatgatgtctctacacagcaacaactgggggataagacacgagtaacgttgttgggcgattatgcccatactcatggttatgatgttgttgcctatggtaataccggaacgcaagcgcagccagataacgatggttttttaagtaaaacgctttatggcgcgctggagcataactttactgatgcctggagcggctttgtgcgcggctatggctatgataaccgtaccaattatgacgcgtattattctccgggttcaccattggtcgatacccgtaaactctatagtcaaagttgggacgccgggctgcgatataacggcgaactgattaaatcacaactcattaccagctatagccatagcaaagattacaactacgatccccattatggtcgttatgattcgtcggcgacgctcgatgagatgaagcaatacaccgtccagtgggcaaacaacatcatcattggccacggtaatgttggtgcgggtgttgactggcagaagcagagcacggcaccgggcacagcttatgttaaggatggatatgatcaacgtaataccggcatctatctgaccgggctgcaacaagtcggcgattttacctttgaaggcgcagcacgcagcgacgataactcacagtttggtcgtcatggaacctggcaaaccagcgccggttgggaattcatcgaaggttatcgcttcattgcttcctacgggacatcttataaggcaccaaatctggggcaactgtatggcttctacggaaatccgaatctggacccggagaaaagcaaacagtgggaaggcgcgtttgaaggcttaaccgctggggtgaactggcgtatttccggatatcgtaacgatgtcagtgacttgatcgattatgatgatcacaccctgaaatattacaacgaagggaaagcgcggattaagggcgtcgaggcgaccgccaattttgataccggaccactgacgcatactgtgagttatgattatgtcgatgcgcgcaatgcaattaccgacacgccgttgttacgccgtgctaaacagcaggtgaaataccagctcgactggcagttgtatgacttcgactggggtattacttatcagtatttaggcactcgctatgataaggattactcatcttatccttatcaaaccgttaaaatgggcggtgtgagcttgtgggatcttgcggttgcgtatccggtcacctctcacctgacagttcgtggtaaaatagccaacctgttcgacaaagattatgagacagtctatggctaccaaactgcaggacgggaatacaccttgtctggcagctacaccttctgaaccacgtcccaccgtgctggtgtttgactccggcgtcggtgggttgtcggtctatgacgagatccggcatctcttaccggatctccattacatttatgctttcgataacgtcgctttcccgtatggcgaaaaaagcgaagcgtttattgttgagcgagtggtggcaattgtcaccgcggtgcaagaacgttatccccttgcgctggctgtggtcgcttgcaacactgccagtaccgtttcacttcctgcattacgcgaaaagttcgacttcccggttgttggtgtcgtgccggcgattaaacctgctgcacgtctgacggcaaatggcattgtcggattactggcaacccgcggaacagttaaacgttcttatactcatgagctgatcgcgcgtttcgctaatgaatgccagatagaaatgctgggctcggcagagatggttgagttggctgaagcgaagctgcatggcgaagatgtttctctggatgcactaaaacgtatcctacgcccgtggttaagaatgaaagagccgccagataccgttgtattgggttgcacccatttccctctactacaagaagaactgttacaagtgctgccagagggaacccggctggtggattctggcgcagcgattgctcgccgaacggcctggttgttagaacatgaagccccggatgcaaaatctgccgatgcgaatattgccttttgtatggcaatgacgccagaagctgaacaattattgcccgttttacagcgttacggcttcgaaacgctcgaaaaactggcagttttaggctgatttggttgaatgttgcgcggtcggaaaattnntttaaatttcctcttgtcaggccggaataactccctataatgcgccaccactgacacggaacaacggcaaacacgccgccgggtcagcggggttctcctgagaattccgacagagaaagcaaaaataaatgcttgactctgtagcgggaaagcgtaatatacgccacctcgcgacagtgagctgaaagccgcgtcactgctctttaacaatttatcagacaatctgtgtgggcactcgaagatacggattcttaacgtcgcaagacgaaaaatgaataccaagtctcaagagtgaacacgtaattcattacgaagtttaattctttgagcatcaaacttttaaattgaagagtttgatcatggctcagattgaacgctggcggcaggcctaacacatgcaagtcgaacggtaacaggaagaagcttgcttctttgctgacgagtggcggacgggtgagtaatgtctgggaaactgcctgatggagggggataactactggaaacggtagctaataccgcataacgtcgcaagaccaaagagggggaccttcgggcctcttgccatcggatgtgcccagatgggattagctagtaggtggggtaacggctcacctaggcgacgatccctagctggtctgagaggatgaccagccacactggaactgagacacggtccagactcctacgggaggcagcagtggggaatattgcacaatgggcgcaagcctgatgcagccatgccgcgtgtatgaagaaggccttcgggttgtaaagtactttcagcggggaggaagggagtaaagttaatacctttgctcattgacgttacccgcagaanaagcaccggctaactccgtgccagcagccgcggtaatncggagggtgcaagcgttaatcggaattactgggcgtaaagcgcacgcaggcggtttgttaagtcagatgtgaaatccccgggctcaacctgggaactgcatctgatactggcaagcttgagtctcgtagaggggggtagaattccaggtgtagcggtgaaatgcgtagagatctggaggaataccggtggcgaaggcggccccctggacgaagactgacgctcaggtgcgaaagcgtggggagcaaacaggattagataccctggtagtccacgccgtaaacgatgtcgacttggaggttgtgcccttgaggcgtggcttccggagctaacgcgttaagtcgaccgcctggggagtacggccgcaaggttaaaactcaaatgaattgacggnnnnncgcacaagcggtggagcatgtggtttaattcgatgcaacgcgaagaaccttacctggtcttgacatccacagaactttccagagatggattggtgccttcgggaactgtgagacaggtgctgcatggctgtcgtcagctcgtgttgtgaaatgttgggttaagtcccgcaacgagcgcaacccttatcctttgttgccagcggtccggccgggaactcaaaggagactgccagtgataaactggaggaaggtggggatgacgtcaagtcatcatggcccttacgaccagggctacacacgtgctacaatggcgcatacaaagagaagcgacctcgcgagagcaagcggacctcataaagtgcgtcgtagtccggattggagtctgcaactcgactccatgaagtcggaatcgctagtaatcgtggatcagaatgccacggtgaatacgttcccgggccttgtacacaccgcccgtcacaccatgggagtgggttgcaaaagaagtaggtagcttaaccttcgggagggcgcttaccactttgtgattcatgactggggtgaagtcgtaacaaggtaaccgtaggggaacctgcggttggatcacctccttaccttaaagaagcgtnctttgcagtgctcacacagattgtctgatagaaagtgaaaagcaaggcgtcttgcgaagcagactgatacgtccccttcgtctagaggcccaggacaccgccctttcacggcggtaacaggggttcgaatcccctaggggacgccacttgctggtttgtgagtgaaagtcgccgaccttaatatctcaaaactcatcttcgggtgatgtttgagatatttgctctttaaaaatctggatcaagctgaaaattgaaacactgaacaacgagagttgttcgtgagtctctcaaattttcgcaacacgatgatgaatcgaaagaaacatcttcgggttgtgaggttaagcgactaagcgtacacggtggatgccctggcagtcagaggcgatgaaggacgtgctaatctgcgataagcgtcggtaaggtgatatgaaccgttataaccggcgatttccgaatgnnnnnnnnnnnnnnnnttcgncacactatcattaactgaatccataggttaatgaggcgaaccgggggaactgaaacatctaagtaccccgaggaaaagaaatcaaccgagattcccccagtancggcgagcgaacggggaggagcccagagcctgaatcagtgtgtgtgttagtggaagcgtctggaaaggcgcgcgatacagggtgacagccccgtacacaaaaatgcacatnctgtgagctcgatgagtagggcgggacacgtggtatcctgtctgaatatggggggaccatcctccaaggctaaatactcctgactgaccgatagtgaaccagtaccgtgagggaaaggcgaaaagaaccccggcgaggggagtgaaaaagaacctgaaaccgtgtangtacaagnnnnnnnnnnnnnnnnnnnnnnnnntgactgcgtaccttttgtataatgggtcagcgacttatattctgtagcaaggttaaccgaataggggagccgaagggaaaccgagtcttaactgggcgttaagttgcagggtatagacccgaaacccggtgatctagccatgggcaggttgaaggttgggtaacactaactggaggaccgaaccgactaatgttgaaanattagcggatgacttgtggctgggggtgaaaggccaatcaaaccgggagatagctggttctccccgaaagctatttaggtagcgcctcgtgaattcatctccgggggtagagcactgtttcggcaagggggtcatcccgacttaccaacccgatgcaaactgcgaataccggagaatgttatcacgggagacacacggcgggtgctaacgtccgtcgtgaagagggaaacaacccagaccgccagctaaggtcccaaagtcatggttaagtgggaaacgatgtgggaaggcccagacagccaggatgttggcttagaagcagccatcatttaaagaaagcgtaatagctcactggtcgagtcggcctgcgcggaagatgtaacggggctaaaccatgcaccgaagctgcggcagcgacactgtgtgttgttgggtaggggagcgttctgtaagcctgtgaaggtgtgctgtgaggcatgctggaggtatcagaagtgcgaatgctgacataagtaacgataaagcgggtgaaaagcccgctcgccggaagaccaagggttcctgtccaacgttaatcggggcagggtgagtcgacccctaaggcgaggccgaaaggcgtagtcgatgggaaacaggttaatattcctgtacttggtgttactgcgaaggggggacggagaaggctatgttggccgggcgacggttgtcccggtttaagcgtgtaggctggttttccaggcaaatccggaaaatcaaggctgaggcgtgatgacgaggcactacggtgctgaagcaacaaatgccctgcttccaggnaaagcctctaagcatcaggtaacatcaaatcgtaccccaaaccgacacaggtggtcaggtagngaataccaaggcgcttgagagaactcgggtgaaggaactaggcaaaatggtgccgtaacttcgggagaaggcacgctgatatgtaggtgaagtccctcgcggatggagctgaaatcagtcgaagataccagctggctgcaactgtttattaaaaacacagcactgtgcaaacacgaaagtggacgtatacggtgtgacgcctgcccggtgccggaaggttaattgatggggtcagcgcaagcgaagctcttgatcgaagcccnnnnnnnnnncggccgtaactataacggtcctaaggtagcgaaattccttgtcgggtaagttccgacctgcacgaatggcgtaatgatggccaggctgtctccacccgagactcagtgaaattgaactcnctgtgaagatgcagtgtacccgcggcaagacggaaagaccccgtgaacctttactatagcttgacactgaacattgagccttgatgtgtaggataggtgggaggctttgaagtgtggacgccagtctgcatggagccgaccttgaaataccaccctttaatgtttgatgttctaacgtggacccgtgatccgggttgcggacagtgtctggtgggtagtttgactggggcggtctcctcctaaagagtaacggaggagcacgaaggttggctaatcctggtcggacatcaggaggttagtgcaatggcataagccagcttgactgcgagcgtgacggcgcgagcaggtgcgaaagcaggtcatagtgatccggtggttctgaatggaagggccatcgctcaacggataaaaggtactccggggataacaggctgataccgcccaagagttcatatcgacggcggtgtttggcacctcgatgtcggctcatcacatcctggggctgaagtaggtcccaagggtatggctgttcgccatttaaagtggtacgcgagctgggtttagaacgtcgtgagacagttcggtccctatctgccgtgggcgctggagaactgaggggggctgctcctagtacgagaggaccggagtggacgcatcactggtgttcgggttgtcatgccaatggcactgcccggtagctaaatgcggaagagataagtgctgaaagcatctaagcacgaaacttgccccgagatgagttctcctgaccctttaagggtcctgaaggaacgttgaagacgacgacgttgataggccgggtgtgtaagcgcagcgatgcgttgagctaaccggtactaatgaaccgtgaggcttaaccttacaacgccgaaggtgttttggcggatgagagaagattttcggcctgatacagattaaatcagaacgcagaagcggtctgataaaacagaatttgcctggcggccgtagcgcggtggtcccacctgaccccatgccgaactcagaagtgaaacgccgtagcgccgatggtagtgtggggtctccccatgtgagagtagggaactgccaggcatcaaattaagcagaaggcccggtcggaagactgggcctttttgcgtttctacaaactctccctgtcgtcataactacaagccatccccccacagatacggtaaactagcctcgtttttgcatcaggaaagcagctatgaaccactccttaaaaccctggaacacatttggcattgatcataatgctcagcacattgtatgtgccgaagacgaacaacaactactcaatgcctggcagcatgcaaccgcagaagggcaacccgttcttattctgggtgaaggaagtaatgtactttttctggaagactatcgcggcacggtgatcatcaaccggatcaaaggtatcgaaattcatgatgaacctgatgcgtggtatttacatgtaggagccggagaaaactggcatcgcctggtaaaatacactttgcaggaaggtatgcctggtctggaaaatctggcattaattcctggttgtgtcggctcatcacctatccagaatattggtgcttatggcgtagaattacagcgagtttgcgcttatgttgattgtgttgaactggcgacaggcaagcaagtgcgcttaactgccaaagagtgccgttttggctatcgcgacagtatttttaaacatgaataccaggaccgcttcgccattgtagccgtaggtctgcgtctgccaaaagagtggcaacctgtactaacgtatggtgacttaactcgtctggatcctacaacagtaacgccacagcaagtatttgatgcggtgtgtcatatgcgcaccaccaaactccctgatccaaaagtgaatggcaatgccggtagtttcttcaaaaaccctgttgtatctgccgaaacggctaaagcattactgtcacaatttccaacagcaccaaattacccccaggcggatggttcagtaaaactggcagcaggttggcttatcgatcagtgccagctaaaagggatgcaaatgggtggggttgcggtgcaccgtcaacaggcgttagttctcattaatgaagacaatgcaaaaagcgaagatgtggtgcaactggcacaccatgtaagacaaaaagtgggtgaaaaatttaatgtctggcttgagcctgaagtccgctttattggtgcatcaggtgaagtgagcgcagtggagacaatttcatgaaggataacaccgtgccactgaaattaatcgcgctgttagcgaatggcgaatttcactcaggtgagcagttgggtgaaacgttaggaatgagccgggcggctattaataaacacattcagacactgcgtgactggggcgttgatgtctttaccgttccgggtaaaggatacagcctgcctgagcctatccagttacttaatgctgaacagatattgggtcagctggatggcggtagtgtaactgtgctgccagtgattgactccacgaatcagtaccttcttgatcgtatcggagagcttaaatcgggcgatgcctgcgttgcagaataccagcaggctggccgtggtcgccggggtcggaaatggttttcgccttttggcgcaaacttatatttgtcgatgttctggcgtctggaacaaggcccggcggcggcgattggtttaagtctggttatcggtatcgtgatggcggaagtattacgcaagctgggagcagataaagttcgtgtcaaatggcctaatgacctctatctgcaggatcgcaagctggcaggcattcttgtggagctgactggcaaaaccggcgatgcggcgcaaatagtcattggagccgggatcaacatggcaatgcgtcgtgttgaagagagtgtcgttaatcaggggtggatcacgctgcaggaagcggggatcaatctcgatcgtaatacgttggcggccatgctaatacgtgaattacgcgcggcgctggaactcttcgaacaagaaggattggcaccttatctttcgcgctgggaaaagctggataattttattaatcgcccagtgaaacttatcattggtgataaagaaatatttggcatttcacgcggaatagacaaacaaggcgctttattgcttgagcaggatggaataataaaaccctggatgggcggtgaaatatccctgcgtagtgcagaaaaataagaaaggggagcattagctcccctgcaaattatttgcgtagtctgacctcttctaccgcatgattagcacttttcgtcaggattaaactggcgcgctcgcgagtaggtagaatattttgctttaagttcagccagttgatctctttccacaacgtcatggcagtcttaatagcttcttctttagttaatttcgcgtagttatgaaaataggaatccgggtctgtaaaagccccttcgcggaatttcagaaaacggttgatataccatgtctgaagtaagtcttccggtgcatcaacatatatcgaaaaatcgacaaaatcagaaacaaatacatgatgtggatcgtgtggataatccatcccgctctgtaagacatttaacccttcaagaattaaaatatcaggctgaacaacagttttatctccatccgggatcacatcataaataagatgcgagtaaacaggggctgtaacgtttggcacgccggacttgagatcggaaacaaacttcaccaggcgatgcatatcatacgattccgggaagcctttcttcttcatcagaccacgttctttcagaacctgattagggtgaaggaagccatctgtagtgatcagttcaacacgacgatgttccggccaacggcttaatagtgcctgcaatacacgggcggttgtacttttccccaccgcgacactaccagcaatactgataatgtaaggaatgcgttgcccgttggtaccaagaaactgttccagaactgcctgacggcgcagattcgagcttatatagaagttcagcaaacgtgacagaggtaaatagatctcggcaacttcttctaacgagagatcttcattaatacctttgagacgggcgatctcatcttccgataacgtcataggtacggaatcacgcagagctgcccactggttgcggtcaaactgtaggtaaggcgtcattaacgttaakcatgtttctggcggtcatagctctatcggcaaagcgatatttgccatggcgcgtcacagttctgttgaatgggttaatgggcaggagggtaacaccagatggggaggaataataagaaaaaatctctcccaggaagctatcgttgaaaagcaatgtgacagatattccatctgataaaaagaattatggtttagcaggagcgcattgttgagcacaatgatgttgaaaaagtgtgctaatctgccctccattcggctgtttcttcatcgtgtcgcataaaatgtgaccaataaaacaaattatgcaattttttagttgcatgaactcgcatgtctccatagaatgcgcgctacttgatgccgacttagctcagtaggtagagcaactgacttgtaatcagtaggtcaccagttcgattccggtagtcggcaccatcaagtccggtggggttcccgagcggccaaagggagcagactgtaaatctgccgtcacagacttcgaaggttcgaatccttcccccaccaccaatttcggccacgcgatggcgtagcccgagacgataagttcgcttaccggctcgaataaagagagcttctctcgatattcagtgcagaatgaaaatcaggtagccgagttccaggatgcgggcatcgtataatggctattacctcagccttccaagctgatgatgcgggttcgattcccgctgcccgctccaagatgtgctgatatagctcagttggtagagcgcacccttggtaagggtgaggtcggcagttcgaatctgcctatcagcaccacttcttttctcctccctgttttttccttctgtttattgcattcaacaagtcgggcatgttgcctggttgatgtggtgatatcaccgatttatccgtgtcttagaggagggacaatcgatgtctaaagaaaagtttgaacgtacaaaaccgcacgttaacgtcggtactatcggccacgttgaccatggtaaaacaacgctgaccgctgcaatcactaccgtactggctaaaacctacggcggtgctgctcgcgcattcgaccagatcgataacgcgccggaagaaaaagctcgtggtatcaccatcaacacttctcacgttgaatacgacaccccgacccgtcactacgcacacgtagactgcccggggcacgccgactatgttaaaaacatgatcaccggtgctgctcagatggacggcgcgatcctggtagttgctgcgactgacggcccgatgccgcagactcgtgagcacatcctgctgggtcgtcaggtaggcgttccgtacatcatcgtgttcctgaacaaatgcgacatggttgatgacgaagagctgctggaactggttgaaatggaagttcgtgaacttctgtctcagtacgacttcccgggcgacgacactccgatcgttcgtggttctgctctgaaagcgctggaaggcgacgcagagtgggaagcgaaaatcctggaactggctggcttcctggattcctacattccggaaccagagcgtgcgattgacaagccgttcctgctgccgatcgaagacgtattctccatctccggtcgtggtaccgttgttaccggtcgtgtagaacgcggtatcatcaaagttggtgaagaagttgaaatcgttggtatcaaagagactcagaagtctacctgtactggcgttgaaatgttccgcaaactgctggacgaaggccgtgctggtgagaacgtaggtgttctgctgcgtggtatcaaacgtgaagaaatcgaacgtggtcaggtactggctaagccgggcaccatcaagccgcacaccaagttcgaatctgaagtgtacattctgtccaaagatgaaggcggccgtcatactccgttcttcaaaggctaccgtccgcagttctacttccgtactactgacgtgactggtaccatcgaactgccggaaggcgtagagatggtaatgccgggcgacaacatcaaaatggttgttaccctgatccacccgatcgcgatggacgacggtctgcgtttcgcaatccgtgaaggcggccgtaccgttggcgcgggcgttgtagcaaaagttctgagctaattgccgataacatttgacgcaatgcgcactaaaagggcatcatttgatgccctttttgcacgctttcgtaccagaacctggctcatcagtgattttctttgtcataatcattgctgagacaggctctgttgagggcgtataatccgaaaagctaatacgcgtttcgatttggtttgcctcgcgatcgcggggtgaaaatgtttgtagaaaacttctgacaggttggtttatgagtgcgaataccgaagctcaaggaagcgggcgcggcctggaagcgatgaagtgggtcgttgtggtggcattgctcttggtggcgattgtcggcaactatctttatcgcgacattatgctgccgctgcgtgcgctggccgtagtaattctgattgctgcagcgggtggtgtcgcgctgttaacgacaaaaggtaaagctaccgttgcttttgcccgtgaagcgcgtaccgaagtccgtaaggtcatttggccgactcgccaggaaacattgcacaccacgctgattgtggctgcggttaccgcagtaatgtcactgatcctgtggggactggatggtattctggttcgcctggtatcctttatcactggcctgaggttctgagatgtctgaagctcctaaaaagcgctggtacgtcgttcaggcgttttccggttttgaaggccgcgtagcaacgtcgctgcgtgagcatatcaaattacacaacatggaagatttgtttggtgaagtcatggtaccaaccgaagaagtggttgaaatccgtggcggtcagcgtcgcaaaagcgaacgtaaattcttccctggctacgtcctcgttcagatggtgatgaacgacgcgagctggcacctggtgcgcagcgtaccgcgtgtgatgggcttcatcggcggtacttccgatcgtcctgcgccaatcagcgataaagaagtcgatgcgattatgaaccgcctgcagcaggttggtgataagccgcgtccgaaaacgctgtttgaaccgggtgaaatggtccgtgttaatgatggtccgttcgctgacttcaacggtgttgttgaagaagtggattacgagaaatctcgtctgaaagtgtctgtttctatcttcggtcgtgcgaccccggtagagctggacttcagccaggttgaaaaagcctaacccagcgatcaaaaaagcggcgatttaatcgttgcacaaggcgcgagattggaatacaatttcgcgccttttgtttttatgggtcttgcccgtaaaacgattttttatatcacggggagcctctcagaggcgttattacccaacttgaggaatttataatggctaagaaagtacaagcctatgtcaagctgcaggttgcagctggtatggctaacccgagtccgccagtaggtccggctctgggtcagcagggcgtaaacatcatggaattctgcaaagcgttcaacgcaaaaactgattccatcgaaaaaggtctgccgattccggtagtaatcaccgtttacgctgaccgttctttcactttcgttaccaagactccgccggcagcagttctgctgaaaaaagcggctggtatcaagtctggttccggtaagccgaacaaagacaaagtgggtaaaatttcccgcgctcagctgcaggaaatcgcgcagaccaaagctgccgacatgactggtgccgacattgaagcgatgactcgctccatcgaaggtactgcacgttccatgggcctggtagtggaggactaagaaatggctaaactgaccaagcgcatgcgtgttatccgcgagaaagttgatgcaaccaaacagtacgacatcaacgaagctatcgctctgctgaaagagctggcgactgctaaattcgtagaaagcgtggacgtagctgttaacctcggcatcgacgctcgtaaatctgaccagaacgtacgtggtgcaactgtactgccgcacggtactggccgttccgttcgcgtagccgtatttacccagggtgcaaacgctgaagctgctaaagctgcaggtgctgaactggtaggtatggaagatctggctgaccagatcaagaaaggcgaaatgaactttgacgttgttattgcttctccggatgcaatgcgcgttgttggccagctgggccaggttctgggtccgcgcggcctgatgccaaacccgaaagtgggtactgtaacgccgaacgttgctgaagcggttaaaaacgctaaagctggccaggttcgttaccgtaacgacaaaaacggcatcatccacaccaccatcggtaaagtggactttgacgctgacaaactgaaagaaaacctggaagctctgctggttgcgctgaaaaaagcaaaaccgactcaggcgaaaggcgtgtacatcaagaaagttagcatctccaccaccatgggtgcaggtgttgcagttgaccaggctggcctgagcgcttctgtaaactaatgcctttacgtgggcggtgattttgtctacaatcttacccccacgtatgctaacgaaagttagcagctaaaaagatttgttcgttggagcctggcctatccaggcctccgtcgaagaccgcaggagtttcgcaagaaacttaatcccctgcgtagacggtgacagaacgctaagattattcttttatattctggcttgtttctgctcaccgtaattaagacgctctctccgtttggaggagtgaagtgagttccagagattttctctggcaaacatccaggagcaaagctaatggctttaaatcttcaagacaaacaagcgattgttgctgaagtcagcgaagtagccaaaggcgcgctgtctgcagtagttgcggattcccgtggcgtaactgtagataaaatgactgaactgcgtaaagcaggtcgcgaagctggcgtatacatgcgtgttgttcgtaacaccctgctgcgccgtgctgttgaaggtactccgttcgagtgcctgaaagacgcgtttgttggtccgaccctgattgcatactctatggaacacccgggcgctgctgctcgtctgttcaaagagttcgcgaaagcgaatgcaaaatttgaggtcaaagccgctgcctttgaaggtgagctgatcccggcgtctcagatcgaccgcctggcaactctgccgacctacgaagaagcaattgcacgcctgatggcaaccatgaaagaagcttcggctggcaaactggttcgtactctggctgctgtacgcgatgcgaaagaagctgcttaatcgcagttatctttttaacgcattcgcttacgtataaacttattctgatattcaggaacaatttaaatgtctatcactaaagatcaaatcattgaagcagttgcagctatgtctgtaatggacgttgtagaactgatctctgcaatggaagaaaaattcggtgtttccgctgctgctgctgtagctgtagctgctggcccggttgaagctgctgaagaaaaaactgaattcgacgtaattctgaaagctgctggcgctaacaaagttgctgttatcaaagcagtacgtggcgcaactggcctgggtctgaaagaagctaaagacctggtagaatctgcaccggctgctctgaaagaaggcgtgagcaaagacgacgcagaagcactgaaaaaagctctggaagaagctggcgctgaagttgaagttaaataagccaacccttccggttgcagcctgagaaatcaggctgatggctggtgactttttagtcaccagcctttttgcgctgtaaggcaccagtagcgtttcacactgtttgactactgctgtgcctttcaatgcttgtttctatcgacgacttaatatactgcgacaggacgtccgttctgtgtaaatcgcaatgaaatggtttaagcgtgatagcaacaggcattgcggaaagtgttccattttccggtcaacaaaatagtgttgcacaaactgtccgctcaatggacagatgggtcgacttgtcagcgagctgaggaaccctatggtttactcctataccgagaaaaaacgtattcgtaaggattttggtaaacgtccacaagttctggatgtaccttatctcctttctatccagcttgactcgtttcagaaatttatcgagcaagatcctgaagggcagtatggtctggaagctgctttccgttccgtattcccgattcagagctacagcggtaattccgagctgcaatacgtcagctaccgccttggcgaaccggtgtttgacgtccaggaatgtcaaatccgtggcgtgacctattccgcaccgctgcgcgttaaactgcgtctggtgatctatgagcgcgaagcgccggaaggcaccgtaaaagacattaaagaacaagaagtctacatgggcgaaattccgctcatgacagacaacggtacctttgttatcaacggtactgagcgtgttatcgtttcccagctgcaccgtagtccgggcgtcttctttgactccgacaaaggtaaaacccactcttcgggtaaagtgctgtataacgcgcgcatcatcccttaccgtggttcctggctggacttcgaattcgatccgaaggacaacctgttcgtacgtatcgaccgtcgccgtaaactgcctgcgaccatcattctgcgtgccctgaactacaccacagagcagatcctcgacctgttctttgaaaaagttatctttgaaatccgtgataacaagctgcagatggaactggtgccggaacgcctgcgtggtgaaaccgcatcctttgacatcgaagctaacggtaaagtgtacgtagaaaaaggccgccgtatcactgcgcgccacattcgccagctggaaaaagacgacgtcaaactgatcgaagtcccggttgagtacatcgcaggtaaagtggttgctaaagactatattgatgagtctaccggcgagctgatctgcgcagcgaacatggagctgagcctggatctgctggctaagctgagccagtctggtcacaagcgtatcgaaacgctgttcaccaatgatctggatcacggcccgtatatctctgaaaccttacgtgtcgacccaactaacgaccgtctgagcgcactggtagaaatctaccgcatgatgcgccctggcganccgccgactcgtgaagcagcggaaagcctgttcgagaacctgttcttctccgaagaccgttatgacctgtctgcggttggtcgtatgaagttcaaccgttctctgctgcgcgaagaaatcgaaggttctggtatcctgagcaaagacgacatcattgatgttatgaaaaagctcatcgatatccgtaacggtaaaggcgaagtcgatgatatcgaccacctcggcaaccgtcgtatccgttccgttggcgaaatggcggaaaaccagttccgcgttggcctggtacgtgtagagcgtgcggtgaaagagcgtctgtctctgggcgatctggataccctgatgcctcaggatatgatcaacgccaagccgatttccgcagcagtgaaagagttcttcggttccagccagctgtctcagtttatggaccagaacaacccgctgtctgagattacgcacaaacgtcgtatctccgcactcggcccaggcggtctgacccgtgaacgtgcaggcttcgaagttcgagacgtacacccgactcactacggtcgcgtatgtccaatcgaaacccctgaaggtccgaacatcggtctgatcaactctctgtccgtgtacgcacagactaacgaatacggcttccttgagactccgtatcgtaaagtgactgacggtgttgtaactgacgaaattcactacctgtctgctatcgaagaaggcaactacgttatcgcccaggcgaactccaacctggatgaagaaggccacttcgtagaagacctggtaacctgccgtagcaaaggcgaatccagcttgttcagccgtgaccaggttgactacatggacgtatccacccagcaggtggtatccgtcggtgcgtccctgatcccgttcctggaacacgatgacgccaaccgtgcattgatgggtgcgaacatgcaacgtcaggccgttccgactctgcgtgctgataagccgctggttggtactggtatggaacgtgctgttgccgttgactccggtgtaactgcggttgctaaacgtggtggtgtcgttcagtacgtggatgcttcccgtatcgttatcaaagttaacgaagacgagatgtatccgggtgaagcaggtatcgacatctacaacctgaccaaatacacccgttctaaccagaacacctgtattaaccagatgccgtgtgtgtctctgggtgaaccggttgaacgtggcgacgtgctggcagacggtccgtccaccgacctcggtgaactggcgcttggtcagaacatgcgcgtagcgttcatgccgtggaatggttacaacttcgaagactccatcctcgtatccgagcgtgttgttcaggaagaccgtttcaccaccatccacattcaggaactggcgtgtgtgtcccgtgacaccaagctggggccagaagagatcaccgctgacatcccgaacgtgggtgaagctgcgctctccaaactggatgaatccggtatcgtttatattggtgcggaagtgaccggtggcgacattctggttggtaaggttacgccgaaaggtgaaactcagctgaccccagaagaaaaactgctgcgtgcgatcttcggtgagaaagcgtctgacgttaaagactcttctctgcgcgtaccaaacggtgtatccggtacggttatcgacgttcaggtctttactcgcgatggcgtagaaaaagacaaacgtgcgctggaaatcgaagaaatgcagntcaaacaggcgaagaaagacctgtctgaagaactgcagatcctcgaagcgggtctgttcagccgtatccgtgctgtgctggtagccggtggcgttgaagctgagaagctcgacaaattgccgcgcgatcgctggctggagctgggcctgaccgacgaagagaaacaaaatcagctggaacagctggctgagcagtatgacgaactgaaacacgagttcgagaagaaactcgaagcgaaacgccgcaaaatcacccagggcgacgatctggcaccgggcgtgctgaagattgttaaggtatatctggcggttaaacgccgtatccagcctggtgacaagatggcaggtcgtcacggtaacaagggtgtaatttctaagatcaacccgatcgaagatatgccttacgatgaaaacggtacgccggtagacatcgtactgaacccgctgggcgtaccgtctcgtatgaacatcggtcagatcctcgaaacccacttgggtatggctgcgaaaggtatcggcgacaagatcaacgccatgctgaaacagcagcaggaagtcgcgaaactgcgtgaattcatccagcgtgcgtacgatctgggcgctgacgttcgtcagaaagttgacctgagtaccttcagcgatgaagaagttatgcgtctggctgaaaacctgcgcaaaggtatgccaatcgcaacgccggtgttcgacggtgcgaaagaagcagaaattaaagagctgctgaaacttggcgacctgccgacttctggtcagatccgcctgtacgacggccgcactggtgaacagttcgaacgtccggtaaccgttggttacatgtacatgctgaaactgaaccacctggtcgacgacaagatgcacgcgcgttccaccggttcttacagcctggttactcagcagccgctgggtggtaaggcacagttcggtggtcagcgtttcggggagatggaagtgtgggcgctggaagcatacggcgcagcatacaccctgcaggaaatgctcaccgttaagtctgatgacgtgaacggtcgtactaagatgtataaaaacatcgtggacggcaaccatcagatggagccgggcatgccagaatccttcaacgtattgttgaaagagattcgttcgctgggtatcaacatcgaactggaagacgagtaattctcgctcaaacaggtcactgctgtcggggtaaaacccggcagcggattgtgctaactccgacgggagcaaatccgtgaaagatttattaaagtttctgaaagcgcagactaaaaccgaagagtttgatgcgatcaaaattgctctggcttcgccanacatgatccgttcatggtctttcggtgaagttaaaaagccggaaaccatcaactaccgtacgttcaaaccagaacgtgacggccttttctgcgcccgtatctttgggccggtaaaagattacgagtgcctgtgcggtaagtacaagcgcctgaaacaccgtggcgtcatctgtgagaagtgtggcgttgaagtgacccagactaaagtacgccgtgagcgtatgggccacatcgaactggcttccccgactgcgcacatctggttcctgaaatcgctgccgtcccgtatcggcctgctgctcgatatgccgctgcgcgatatcgaacgcgtactgtactttgaatcctatgtggttatcgaaggcggtatgaccaacctggagcgtcagcagatcctgactgaagagcagtatctggacgcgctggaagagttcggtgacgaattcgacgcgaaaatgggtgcggaagcaatccaggccctgctgaagagcatggatctggagcaagagtgcgaacagctgcgtgaagagctgaacgaaaccaactccgaaaccaagcgtaaaaagctgaccaagcgtatcaaactgctggaagcgttcgttcagtctggtaacaaaccagagtggatgatcctgaccgttctgccggtactgccgccagatctgcgtccgctggttccgctggatggtggtcgtttcgcgacttctgacctgaacgatctgtatcgtcgcgtcattaaccgtaacaaccgtctgaaacgtctgctggatctggctgcgccggacatcatcgtacgtaacgaaaaacgtatgctgcaggaagcggtagacgccctgctggataacggtcgtcgcggtcgtgcgatcaccggttctaacaagcgtcctctgaaatctttggccgacatgatcaaaggtaaacagggtcgtttccgtcagaacctgctcggtaagcgtgttgactactccggtcgttctgtaatcaccgtgggtccatacctgcgtctgcatcagtgcggtctgccgaagaaaatggcgctggagctgttcaaaccgttcatctacggcaagctggaactgcgtggtcttgctaccaccattaaagctgcgaagaaaatggttgagcgcgaagaagctgtcgtttgggatatcctggacgaagttatccgcgaacacccggtactgctgaaccgtgcaccgactctgcaccgtctgggtatccaggcatttgaaccggtactgatcgaaggtaaagctatccagctgcacccgctggtttgtgcggcatataacgccgacttcgatggtgaccagatggctgttcacgtaccgctgacgctggaagcccagctggaagcgcgtgcgctgatgatgtctaccaacaacatcctgtccccggcgaacggcgaaccaatcatcgttccgtctcaggacgttgtactgggtctgtactacatgacccgtgactgtgttaacgccaaaggcgaaggcatggtgctgactggcccgaaagaagcagaacgtctgtatcgctctggtctggcttctctgcatgcgcgcgttaaagtgcgtatcaccgagtatgaaaaagatgctaacggtgaattagtagcgaaaaccagcntgaaagacacgactgttggccgtgccattctgtggatgattgtaccgaaaggtctgccttactccatcgtcaaccaggcgctgggtaaaaaagcaatctccaaaatgctgaacacctgctaccgcattctcggtctgaaaccgaccgttatttttgcggaccagatcatgtacaccggctttgcatatgcagcgcgttctggtgcatctgttggtatcgatgacatggtcatcccggagaagaaacacgaaatcatctccgaggcagaagcagaagttgctgaaattcaggagcagttccagtctggtctggtaactgcgggcgaacgctacaacaaagttatcgatatctgggctgcggcgaacgatcgtgtatccaaagcgatgatggataacctgcaaactgaaaccgttattaaccgtgacggtcaggaagagaagcaggtttccttcaacagcatctacatgatggccgactccggtgcgcgtggttctgcggcacagattcgtcagcttgctggtatgcgtggtctgatggcgaagccggatggctccatcatcgaaacgccaatcaccgcgaacttccgtgaaggtctgaacgtactccagtacttcatctccacccacggtgctcgtaaaggtctggcggataccgcactgaaaactgcgaactccggttacctgactcgtcgtctggttgacgtggcgcaggacctggtggttaccgaagacgattgtggtacccatgaaggtatcatgatgactccggttatcgagggtggtgacgttaaagagccgctgcgcgatcgcgtattgggtcgtgtaactgctgaagacgttctgaagccgggtactgctgatatcctcgttccgcgcaacacgctgctgcacgaacagtggtgtgacctgctggaagagaactctgtcgacgcggttaaagtacgttctgttgtatcttgtgacaccgactttggtgtatgtgcgcactgctacggtcgtgacctggcgcgtggccacatcatcaacaagggtgaagcaatcggtgttatcgcggcacagtccatcggtgaaccgggtacacagctgaccatgcgtacgttccacatcggtggtgcggcatctcgtgcggctgctgaatccagcatccaggtgaaaaacaaaggtagcatcaagctcagcaacgtgaagtcggttgtgaactccagcggtaaactggttatcacttcccgtaacaccgaactgaaactgatcgacgaattcggtcgtaccaaagaaagctacaaagtaccttacggtgcggtactggcaaaaggcgatggcgaacaggttgctggcggcgaaaccgttgcaaactgggacccgcacaccatgccggttatcaccgaagtaagcggttttgtacgctttactgacatgatcgacggccagaccattactcgtcagaccgacgaactgaccggtctgtcttcgctggtggttctggattccgcagaacgtaccgcaggtggtaaagatctgcgtccggcactgaaaatcgttgatgctcagggtaacgacgttctgatcccaggtaccgatatgcctgcgcagtacttcctgccgggtaaagcgattgttcagctggaagatggcgtacagatcagctctggtgacaccctggcgcgtattccgcaggaatccggcggtaccaaggacatcaccggtggtctgccacgcgttgcggacctgttcgaagcacgtcgtccgaaagagccggcaatcctggctgaaatcagcggtatcgtttccttcggtaaagaaaccaaaggtaaacgtcgtctggttatcaccccggtagacggtagcgatccgtacgaagagatgattccgaaatggcgtcagctcaacgtgttcgaaggtgaacgtgtagaacgtggtgacgtaatttccgacggtccggaagcgccgcacgacattctgcgtctgcgtggtgttcatgctgtgactcgttacatcgttaacgaagtacaggacgtataccgtctgcagggcgttaagattaacgataaacacatcgaagttatcgttcgtcagatgctgcgtaaagctaccatcgttaacgcgggcagctccgacttcctggaaggcgaacaggttgaatactctcgcgtcaagatcgcaaaccgcgaactggaagcgaacggcaaagtgggtgcaacttactcccgcgatctgctgggtatcaccaaagcgtctctggcaaccgagtccttcatctccgcggcatcgttccaggagaccactcgcgtgctgaccgaagcagccgttgcgggcaaacgcgacgaactgcgcggcctgaaagagaacgttatcgtgggtcgtctgatcccggcaggtaccggttacgcgtaccaccaggatcgtatgcgtcgccgtgctgcgggtgaagctccggctgcaccgcaggtgactgcagaagacgcatctgccagcctggcagaactgctgaacgcaggtctgggcggttctgataacgagtaatcgttaatccgcaaataacgtaaaaacccgcttcggcgggtttttttatggggggagtttagggaaagagcatttgtcagaatatttaaggaatttctgaatactcataatcaatgtagagatgactaatatcctgaaactgactgaactaattgagtcaaactcggcaaggattcgatactattcctgtgtagctttcttaaggaacgagaatgaaacaggaagtggagaagtggcgaccttttaaacatccggatggcgacgttcgtgatttatcgtttcttgatgctcatcaggttatctacgttcagcatcatgaggacaaggagcctttagagtatcgcttttgggttacctactctcttcactgcttcacaaaagattatgaacatcagacgaacgaagaaaaactatcgttaatgtaccacgcgcctaaagaatctcgtcccttctgccagcaccgttataacttagcgcgcacacacttaaaaagaactattttggcgctgccagaaagcaacgttattcatgccgggtatggtagctatgccgtgattgaggtggacttagacggaggagataaggcattttactttgttgcgttcagggctttcagtgaaatttttcaccattgcctaaaacttattgagaaataagcagcttcctcagccctcaaaataacaaaacccaccttaaggtgggtttcgccagagaattatctctggtattcagaacgccattaccggactttgccttgaccttgcgataatcgcaggttgcgggatgtctgaatttcttcagtctgctgcatcctggaagatgagaacatgtgttcttattttcgtctctatcatagttgagtatttactctcttacaatcagatctctttcattgctcaacaggcgatggcttcagactttgcattacggaatttttaagaaaggcagggcgaaacgaggaagaagcttttcgccctggacaacattcctgctgacggcactaccataaaaaaacacaacgctttcaacaaccttgcgtttttcatcttccgtagcggctcggaataaattttcgttctnacattccgtctcatagtctttgcgaggcgcgtcccagatagctgtcccagtctttccataccggctgcaaaccctgagcggttaacgcggcagcaaccgcttccggtctgcgctcgtcgtgcggtgagaactgttccagctcggggtgattgtcggcatagccacctggctgcgttttcgaaaaagcgctgacgttattaattgccagcggaataacgcgatcgcgaaaccacggtgattcccgcgtggagagtgacagttcaatctccggtgcaagcagccggaaggcgcagatggtttgcactaactggcgttcatccataatcgacgcaggctcaatgccgccagtacatggacgcaggcgtgggaaggagacagagtagcggctttgccagtaatgctgttgcagccatagcaaatgttctgcaaccatatagcagtcaacgcgccagctgtcggaaaggccaattagcgcgccgaggcctatcttatcaatccccgcacggcccagccgatccggcgtttccagccgccagaagaagtcctgttttttgcctttcagatgatggcgggcataagtcgcctcgtgatatgtctcctgataaaccatcacgccatccagaccaagttgctttaactcggcgtattccgtctccgccagcggctgtacttccatctgtagtgaagagaactgttcacgcagggcagggagatgacgacgaaagtaatccatccccactttcgcctgatgttcaccggtgactaaaagcagatgttcaaagcccatctcccgtatagcggcgctttccctggcaatatccgcttcatccagcgttttgcgcttgatgcggttgctcatagagaatccgcagtacgtgcagtcgttagcgcaaagattggaaagataaagcgggacgtagaaactaactgtgttgccaaatcgctgacgggtcagacgctgcgcccgttgggccagttgttccagatagccactggcggctggcgataacagcgccatcatatcgtcgcgggtgagttgcgaggcatttagcgcccgctctacgtcagcagccgttttgccgttgatacgcaggcggatgtcgtcccagtccagttgtcgccagcgatcgctgaaggttttcataccgatgcctccagaaatccggtcagcgggctggtggcatgagcaaaataactgcggctgcccggtccngactgaggtgccagcaggcctgcttctactgccagacgaaatgccttcgccatgttgacgggatcgtccgcgacggcaatcgccgtattcactaacaccgcgtcggcccccatttccagcgcctgcgcggcatggctgggaacgccgatgccagcatcgacaaccaccggaactgtggcctgctggataataatctccagcatggcgcgggtttccagcccctgattcgagccaatcgnnnnnnnnngcggcatcaccgctgcacagccgacttcttccagacgtttacacaataccggatcggccccgcagtaaggcagcacgacaaatccctgttgtaccagcgtttcggcggctttcagggtttcgatgggatcgggcaacagccagcgggcgtcagggtgaatctccaattttaaccagtttgtgcctaacgcttcacgagccagatgggcggcgaaaatggcttcttccgctgttttcgccccggatgtatttggcagcagggtcacacccgccgcgataagcggttcgaggatagcgtcgttgtgctggcgcaagtcgacacgtttcatcgccagcgtcaccagctggctgccggaagcgcggattgcctctaccatcagttgtgaagaggcgaatttcccggtgccggtaaacagatgtgaatcaaacgttttgtccgcaatacgtaacatctcaaccccctgcaataacctgaaaaagtangatctggtcgccatcctgcacgatatgttgcgtccactgctcacgcgggacgatttgctgattaatcgccagagccgcgcccgcttgtcgttggacgagttgctccagtagttcgtgaacagtttgcccggcggcgcactgcatcggttgatcgttaaacaggatctgcattgcttcctccgcataccgggcaaccactggcgcggcgcaacgccaggctgcgccactggctcgacttaccgtcgaacagtcggagttctcccgcaggcgtctctataccgcttaataacttaatggcttccagtgcctgcaaagtgcccataaccccgaccaccgggccaaccacgcccgccgtgcggcagttgcgttctggctcctggttttctggccacaggcagcggtaacaaccctgcccccagggcggcgtcagtaccatcaactgaccgccaaatccgaccgcgctggcggtgataagcggcgtgttgagtgccacgcaggcggcattaatctcctggcgagtcgccatattgtcggtacagtcgagcaccacatcggcttgtgcaaccgcatcttttaacgcctcacccgttaaccgttgttgtaatgctgtcagttgaatatcgggattcaactgtgtcagtcgctgatggctgacctgcgatttcgggcgatcgatatcttcagtggtaaagaggatttgtcgttgcagattgcttaaatgcacatcgtcgtcatctgccagtaccagcgtcccgacgccagcgcccgccaggtatagcgcagcaggtgtacccagcccgccaagaccgataatcagcacctggctgtcgagcagtttttgctgcccgtcaagagcgatatcgtcgagcaggatttggcggctataacgcataaaatcacggtcattcatcgccaactcctgcaatttccagcaactgtgccgttgccaaacgccagtctgcggcttgagtaatggcgctgacgacggcgatactgccgacacccgttgctatcaccgcaggcgcgcgtgccagactgataccgccaatcgccacggtgggataatccgacagtcgctcaacatgccgtgccagctgttccagcccctgcggtgcagaaggcatctgtttggtttgcgtcgggaacacatgtcccagcgcgatataagaggggcgtgctgccagcgcgacgtcgatttccatatcgtcatgggtcgaaacgcccagccgcaggcctgccgcgcggatggcattgagatcggtggcttgcaaatcttcctgccccaaatggacgccatacgcctgatgcttgatcgcgagccgccagtaatcgttgataaacaatcgcgcgttatagcggcggcccagcgcaattgccgccacgacatcggcttccacctcttcatcgcgccgatctttgatgcgtagctggagagtacgtacgcctgcatccaacagacgttcgatccactgtacgctgtccaccaccgggtacagtcntanacgaaaaggtacaggaggaaaatcaggntgatacatcacgcttcctccttacgcaggtagatttctccgcctntggcacggaagttctcngacatatccgntattcccatttcaatagtttgcgnggcggcgtaatcacgcacttcctggctgattttcatcgagcagaatttcggcccacacatggagcanaaatgggcgactttacntgactcttgcggcagggtttcatcgtgataagcgcgggcggtaaacgggtcgagggccagattaaactggtcttcccagcgaaattcgaagcgggctttcgacatggcgttatcgcgaatttgtgcgcccggatgccctttcgccaggtcagcggcgtgggcggcaatcttataggtggtaagcccctgcttaacatcttctttattaggcagacccagatgctcttttggcgttacgtaacagagcatcgcgcagccaaaccagccaatcatcgccgcaccaatccccgacgtgaagtggtcatagcccggcgcaatatcggtagttagcggccccagagtgtaaaacggcgcttcgtggcagtgctctaactcctcggtcatattgcggcggatcatctgcatcggcacgtggcctgggccttcaatcatcacctgcacatcatattcccaggcgatttttgtcagttcgcccagcgtatgcagctcggcaaactgcgcttcatcgttggcgtcctgaatagaaccggggcgcagaccgtcgcccagcgacagcgaaacgtcataagcggcacagatttcacaaatttcgcggaagtgttgatagaggaaattttcctgatgatgggagaggcaccatttcgccataatcgaaccgccgcgcgagacgataccggtcaggcgtttcgcggtcatcggcacatagcgcagcagcacccccgcatggatagtgaagtaatccacaccttgctcggcctgttccagcagcgtgtcgcggaacgcttcccaggtaagntcttcggcgatcccattaaccttctccagcgcctggtagatcggcactgtaccaatcggcaccgggctgttacgcaaaatccactcgcgggtttcgtgaatatagcgaccggtggagagatccatcaccgtatccgctccccagcgcgtggaccataccagcttttccacttcttcttcgatggaagaggtgaccgccgagttgccgatattggcgttaacttttaccaggaaattgcgaccaataatcatcggctccgattccggatgattaatgttggccgggataatcgcacgtccggcagcaacttcatcacggacaaattccgcagtgatattttccggcagacgtgcgccaaagctcattcccggatgctggtggcgtaaaacttcgctacggatgcgctcgcggcccatattctcgcggatggcgatgaattccatttccggtgtgatgatgccctggcgggcgtagtgcagttgtgtgacgcggcgtcctgctttggcgcgttttggcgttaatacnnnnctaaaacgcagctcgtcgaggccatcatctgccagccgcgctttagtgtaatcggaactgcgcacggtaagttcttcggtatcgccgcgcgcatcgatccacggctggcgtagttttgccagcccttgctgcacgttaatggcgatctgcggatcgccatacgggccggaggtgtcgtagaccggaatcgcttcgttttcttcgtactgcggctgttctttgctaccgccaattagcgtcgggctaagctggatctcacgcatcggcacgcgcacgccgggttgtgtgccagtgatataaatgcgttttgagttgggaaaggcggtgccttccagggtgtcgataaaatgttgggcctgggcgcgttgttcgcgacgggtcagttttgttgcagacatagctcattccaaaaagttaaggacgtggcttgtcagacgacggatgaagcaagagacgatcgccgcaaaggcgatgcgatagcagattaactcttgttcccttcgcaggtattagcctgatcaggttccgcggatcccgaataaacggtctcagccagttaaggcactccgacaagaaattagccccacaaacggggcgttgaatgtaaattacgcgttaacagcgcagaactcaagcaggatgtttgacgcgggcggcgtcaagcaccagcagaatcagcttatcttccagcacaaagcgcgcttccagcgcctcgccgatgtcagataaaacctgttgaaactcaaggtaattatcatgatcgatagcggtttccaggctggaatcgtagtaatccataatctgttgggtattggcttcgagttgcggccaaatcttcgnnnnnnncgcgagttgcccgttgccttccagcttatgaagaatgcgctcataaatactgaaatgtccggcagacaagtaatcgaccaggctctgacaaaaatcatcaagggctttttcgtttagcctcatgtacgattctttgccaggcttaatgccaaccagattgtagtaagccacgagcagatgcttacgtacatgtagccagngatcaaccagtttgttacttcctctgacgcgctccgtcaggttatcgagctggttaagcatgattgactccgcaagtttgtattcaaaaactgctcagtgagaaatgtaaaaaccatgttaaacatgccagtgatgcaaaggtagtgcaagagctatggatcgtataattgaaaaattagatcacggctggtgggtcgtcagccatgaacaaaaattatggttgccgaagggagaattgccatatggcgaagcggcaaatttcgatcttgtgggtcagcgngcactacaaatcggcgaatggcagggggaacctgtttggttaatacaacagcagcggcgttacgatatggggtcggtacgtcaggtcattgatctcgatgttgggctgtttcaactggccggacgtggcgtacaactggcggagttttaccgatcgcataaatactgtggttactgcgggcatgaaatgtatccaagcaaaaccgaatgggcgatgctgtgcagccattgccgtgagcgttactacccgcaaatcgccccctgcattattgttgccatccgtcgcgatgattcgatcctcctcgcccagcatacccgccatcgtaacggtgtccatacggtacttgccggattcgtcgaagtgggcgaaaccctcgagcaggcggtcgcgcgggaagtgatggaagagagcggaattaaagttaaacacttgcgttatgtgacttcccagccgtggccgtttcctcagtctttaatgaccgcgtttatggcggaatatgacagcggcgacatcgtgatcgacccgaaagaattgctcgaggcgaactggtatcgctatgacgatttgccgttactcccgccgcccggcaccgtagcgcgccgtctgatagaagatacggtggcgatgtgtcgggcagagtatgagtgatgatacactgaccgcctgacgcactaaggaacagccaaaatgaccgaacttaaaaacgatcgttatctgcgggcgctgctgcgccagcccgttgatgtcactccagtatggatgatgcgccaggcgggtcgctatctaccggaatataaagccacgcgcgcccaggcgggcgattttatgtcgctgtgcaaaaacgccgagctggcgtgtgaagtgaccttgcaaccgctgcgtcgctacccgctggatgcggcgatcctcttttccgatatcctcaccgtcccggacgcgatggggttagggctctattttgaagccggagaaggtccgcgttttacctcgccagtcacctgcaaagctgacgtcgataaactgccaattccggacccggaagatgaactggggtacgtgatgaacgcggtgcgtaccattcgtcgcgaactgaaaggcgaagtgccgctgattggtttttccggcagcccgtggacgctggcgacctacatggtggaaggcggcagcagcaaagccttcaccgtgatcaaaaaaatgatgtatgccgatccgcaggcgctgcacgctctactcgataaactggcgaaaagcgtcactttgtatctgaatgcgcagattaaagccggtgctcaggctgtgatgattttcgacacctggggcggcgtgcttaccgggcgcgattatcaacagttctcgctttattacatgcataaaattgttgatggtttactgcgtgaaaacgacggtcgccgcgtaccggtcacgctgtttaccaaaggcggcggacagtggctggaagccatggcagaaaccggttgcgatgcgctgggcctcgactggacaacggacatcgccgatgcgcgccgccgtgtgggcaataaagtcgcgttgcagggtaatatggatccgtcgatgctgtacgcgccgcctgcccgcattgaagaagaagtagcgactatacttgcaggtttcggtcacggcgaaggtcatgtctttaaccttggtcacggcattcatcaggatgtgccgccagaacatgctggcgtgttcgtgnaggcagtgcatcgactgtctgaacagtatcaccgctaaggagcgattatggatctcgcgtcattacgcgctcaacaaatcgaactggcttcttctgtgatccgcgaggatcgactcgataaggatccgccggatctgatcgccggagccgatgtcgggtttgagcagggcggagaagtgacgcgagcggcgatggtgctgctgaaatacccctcgcttgagctggtggagtataaagtggcccgcatcgctaccaccatgccttacattccaggttttctttccttccgcgaatatcctgcgctgctggcagcgtgggagatgctgtcacaaaagccggatttagtgtttgtcgatggtcatgggatctcgcatcctcgccgtcttggcgtcgccagccattttggtttgctggtggatgtgccgaccattggcgtagcgaaaaaacgactatgcggtaaattcgaaccgctctccagcgaaccgggcgcgctggccccactgatggataaaggcgagcagctggcctgggtctggcgcagcaaagcgcgctgtaacccgctatttatcgctactggtcatcgggtcagcgtggacagcgcgctggcgtgggtacaacgctgcatgaaaggctatcgtctgccggagccaacgcgctgggcggacgcggtggcctcggaacgtccggcgttcgtgcgctatacagcaaatcagccctaattcaggtaaactgcggataatttccgtatttgagaantcaacatgttacaaaacccaattcatctgcgtctggaacgcctggaaagctggcagcatgtcactttcatggcttgcttatgcgaacgcatgtaccccaattacgccatgttctgccagcaaaccggttttggtgatgggcaaatttaccgtcgtattctcgatctcatctgggaaacgctgaccgttaaagatgcaaaagtaaatttcgacagccaactggagaaatttgaagaagcgattccttcagccgacgatttcgatctgtacggcgtttatccggcaatcgatgcctgcgtggcgttaagtgaactggtccattcgcgtttgagtggtgaaacgctcgaacacgcggtggaagtgagtaagacctccatcacgaccgttgcgatgctggaaatgactcaggctggtcgcgaaatgagcgatgaagagctcaaagaaaacccagctgtagagcaagaatgggacattcagtgggaaatattccgacttttagctgagtgcgaagaacgcgatatcgagctgataaaaggccttagggcagacctgcgtgaggcgggtgagagcaatattggtataatttttcagcaataagaccagaaaacgtgatttaacgcctgatttgtcgtacctggagtcttccctttcgccccccgtctggtctacatttggggggcgaaaaaaagtggctatcggtgcgtgtatgcaggagagtgctattctggcatttccgtcgcactcgatgcttagcaagcgataaacacattgtaaggataacttatgaacaagactcaactgattgatgtaattgcagagaaagcagaactgtccaaaacccaggctaaagctgctctggagtccactctggctgcaattactgagtctctgaaagaaggcgatgctgtacaactggttggtttcggtaccttcaaagtgaaccaccgcgctgagngtactggccgcaacccgcagaccggtaaagaaatcaaaattgccgcagctaacgtaccggcatttgtttctggcaaggcactgaaagacgcagttaagtaagattgcgtggcagtgaacagttttaacgaaggggtggtttcaccccttttgtctttctggcgtcgatcattgatgctggctggcgctctgtttctcactgcttgtagtcacaactcttcacttcctccctttaccgccagtggatttgctgaagaccagggcgcggtacgcatctggcgaaaagacagcggcgataatgtgcatcttcttgccgtgtttagcccgtggcgcagtggcgataccacgacgcgagagtatcgctggcagggcgataacctcacgntcatcaatatcaatgtttacagcaaacccccggtgaatattcgnnnncgttttgacgatcgcggtgatctgagctttatgcaacgtgaatccgatggggaaaagcagcagctttctaacgaccaaatcgatttataccgttatcgggctgatcagatccgccagattagcgatgccttacgtcaggggagagtcgtgctgcgccaggggcgctggcatgcgatggaacagaccgtgaccacctgcgaagggcaaaccattaaacctgatttagattcgcaggcgatagcgcatatcgagcgccgccagagccgctcttctgttgatgtcagcgtggcatggctggaagcgcccgaaggttcgcaattactgttagtggcaaactctgatttctgtcgctggcaacccaacgagaaaacgttctgatttaccagtggcccatacccatatgaccgccaccaccgcagccgccgtagcccatgcccattccggctccgcgcggaatacccgcttcagccatcgcaatatcccgtttcacccgtaactcatctaacgactgacgcaaattctccatctctttggcgaccgcgttaattttgctgctatccggtgggttcgcggctaacagggcattgtattcataacgcttcgtcaccagttgctgttgcagtgcgctgctttgagcgtaaaagtcattatggattttctgccacgctgtctgttgttcgctggtcaaaggcgcggcattttgctgccacataccgtgtccgccgtgagcaaatgcagatgtcgatcccatcgccattgctgaaagcgccatcattaccagggcaattttcgtgttccgtttcatggttaatcctccagtggttgtcttacttcgggtattgcatcttccgtgccaacgatgaaacgctgatatgacgggtaatctggcatgataaacgagtaaaaatgactcgcctgctgcgggtagcgagtcatttttactcattgaaacttaagcctttgtgttacagcgcagggtaagcgctgataaaagatggcatgatttctgctgtcagaaagggatgagcaggcaaagaagaagatgcgttttatgcaacgttctaaagactccttagctaaatggttaagcgcgatcctccccgtggtcattgttgggctggtagggttgtttgcggtgacggtgattcgcgattatggccgcgagactgccgccgccagacaaacgctgctggaaaaaggcagtgtacttattcgtgctctcgaatccggctcgcgcgtcggcatggggatgcgcatgcatcatgcgcagcagcaggccttactggaagaaatggccgggcagcctggagtacgttggtttgcggtcacggatgaacaaggaacaatcgtgatgcatagcaactccggcatggtgggaaaacagctttattccccgcaggaaatgcagcagttacatccgggagatgaagaagtgtggcggcggatcgatagcgcagacggcgagcctgttctggaaatttatcgccagtttcaaccgatgtttgctgctggaatgcaccggatgcgccatatgcagcagtatgccgcgacaccacaagcaattttcatcgctttcgacgccagtaatattgtgagtgccgaagatcgtgagcagagaaacaccctgattatcctcttcgccctggcgacggtcttgctggcaagcgtattgtcattcttctggtatcgccgctatctgcgctcgcgccagcttctacaagatgaaatgaagcgcaaagagaagctggtggcgctggggcatcttgcggcaggcgttgcccacgaaattcgtaacccgctttcctcgattaaagggctggcaaaatactttgcngnnnnngcgccagcagggggagaagcgcatcaactggcgcaggtgatggcgaaagaagctgaccgtttaaaccgcgtggtaagcgagctgctggaactggttaagccaacgcatctggctttgcaggcggtggatctcaacacgctgattaaccactcattacagctggtaagccaggatgcaaactgccgggagatccagttacgctttaccgccaacgacacgttgccggaaattcaggccgatccggacaggctgactcaggtcctgttgaatctttatctcaatgctattcaggcgattggtcagcatggcgtgattagcgtgacggccancnaaagcggcgcgggcgtgaaaatcagcgttaccgacagcggtaagggaattgcggcagatcagcttgaagccatcttcaccccgtacttcaccaccaaagccgaaggcaccggactggggctggcggtcgtgcataatattgttgaacaacacggtggtacaattcaggtcgcaagcctggagggaaaaggcgcaaggttcaccctctggcttccggtcaatattacgcgtaaggacccacaaggatgacgcacgataatatcgatattctggtggtggatgatgacattagccactgcactattttgcaggctttgctgcgcggctggggctataacgtcgcgctggcgaacagcgggcgacaggcgctggagcaggtgcgggagcgggtttttgatcttgtgctttgcgatgtgcgaatggcggagatggacggcattgccacgctaaaagagatcaaagcgttaaatccggcgattccggtactgattatgaccgcatactctagcgtcgagacggcggtagaggcgttgaaaaccggggcgctggattatctcatcaagccgctggatttcgataacctgcaggcgacgctggaaaaggcgctcgcgcatacgcacattattgatgctgaaacgcctgcggtgactgccagccagttcggtatggtcggtaaaagcccggcgatgcaacacctgctcagtgaaatcgccctcgtcgcgccatcggaagccacggtgctgatccacggcgattccggcaccggtaaagagctggtcgccagggcgattcacgccagtagcgcacgtagcgaaaaaccgctggtaacgctcaactgtgcggcactcaacgaatccttgctggaatctgaattgttcggtcacgaaaaaggggcgtttactggagccgataaacgccgggaagggcgctttgttgaggcggacggcggcacgttgtttctcgatgaaattggcgatatntcgccgatgatgcaggtgcgtctgctgcgtgcgattcaggagcgcgaagttcagcgtgtcggtagcaaccagactatttcggttgatgtccggctgattgccgcgacccatcgcgatcttgccgcagaggtgaatgccgggcgttttcgccaggatctctactatcgcctgaacgtggtggcgattgaagtaccatcgctgcggcaacggcgggaagatattcctctgctggctggccattttctgcagcgctttgctgaacgtaatcgcaaggcggtaaaaggctttacgccccaggcgatggatctgttgattcattacgactggccgggaaatattcgtgaactggaaaatgcggtggaacgggcggtggtgctgctgactggggaatatatttccgaacgcgagctgccgctggcgattgccagtacgccgatcccgctggcacaaagcctggatattcagccgctggtggaagtcgaaaaagaagtgattctggcggcactggagaaaacgggcggcaacaaaaccgaagccgcccgtcagttagggatcacgcgcaaaacgctgttggcaaaattgtcgcgttagttctgctcgcgttcgatagcgcgccagccgatatctttccggcagaagcagtcgtcccagtggatatcggtcattaaggcataggcgcgtttntgtgcttctgctacggtatgacccagcgcggtgacgcacagtacgcgcccgccgctggttaccacctgctcgtcatccgccagttttgtgcccgcgtggaacactttgccgtcttccacttcttccagcggcaggccgtggatcacgtcaccggtgcggtaatcgcccggatatccacccgcagccatcaccacgccgagagaagcacgttcatcccactctgacgttttctcgtctagtttgccttcacaggccgccaggcagagttcaacaagatcggacttcatgcgcagcataatcggctgggtttctggatcgccaaagcggcagttaaattcgataaccttcggattgccctgtttgtcgatcatcaggcccgcgtagagaaaaccggtgtaggtgttgccttccgacgccatgcctttcacggttggccagatgatacgttccatcgtgcgctgatgaacgtcatctgtcactaccggcgcaggagagtaagcgcccattccgcccgtgttcggcccggtatctttatcgcctacgcgtttgtgatcctggctggtggccatcggcagcacatgctcgccgtccaccatcacgataaagctcgcttcttcgccgtcgaggaactcttcgataacgatgcgatgacccgcgtcgccaaacgcgttgcccgccagcatatcgtgaacagccgcttccgcttcttccagcgtcatcgccacgataacgcctttcccggcagccagaccgtccgctttaatgacgattggcgcgcctttctcacgcagatacgccagcgcaggttctacctcggtgaagttctgatattccgccgtaggaatgttatggcgggccaggaaatctttagtaaacgctttcgagccttccagctgtgnggcgcctgcggttgggccgaagattttcatcccggcggcgcggaaggtatcgaccacgcctttcaccagcggcgcttccgggccgacgatggttagatctaccttttcgttttgcgcgaaatccagcagcgccgggatatcggtcacgccgatagcgacgttttgcagcgtgggttccagcgctgtgcctgcgttacccggagcaacaaaaacagtctcaaccagcggcgactgggccgctttccaggccagcgcgtgctcgcgcccgccgttaccaatcactaatactttcatctgtcgctccattaatggcggaagtggcgcatatcggtgaagagcatcgcaataccgtgctcgtcggcggcggcaatcacttcgtcatcacggatggaaccgccaggctggattacgcaggtcacgcccgcagcggcggcggcatcaataccgtcgcggaacgggaagaacgcgtcagaagccatcgaggaacctttcacttccaggccttcatcggcagctttaataccggcgattttcgcggagtacacgcggctcatctggcccgcgccaataccgatggtcatattgtttttggcatagacgatagcattggatttcacgaanttcgccactttccagcagaacagcgcatcacgcagttcctgttcggtcggctgacgtttggtgacgacgcgcagttcttccgcaccgaccatgcccagatcgcgatcctgaaccagcagaccgccgttcacgcgtttgaaatcaagacccggaacacgctcgccccactgaccgcaggtcagaacgcgtacattctgtttggcggcggtgattttcagggcttcttcgctggcggacggcgcaataatcacttcaacaaactgacgagaaatgatggcctgtgcggtttccgcatccagctcgcggttaaaggcaatgatgccgccgaatgcggaggtcgggtcggttttgtacgcgcgatcgtaagcatcaagaattgaattgccgatagccacgccgcaagggttggcgtgcttcacaatcacacatgccggctcggcgaactctttcacgcactccagcgccgcatcggtatcggcgatgttgttataagagagggctttaccctgaacctgggttgcggtagcaacggaggcttctttcacattctcttctanatagaaggcagcctgctggtggctgttctcgccgtaacgcatatcctgcttcttaatgaagttcaggttcagcgtgcgtgggaagcgaccggcggcttctttgctttcaccgtgataagccggaaccatgctgccgaagtagttggcaatcatgctgtcgtaggcggcagtgtgttcgaaggctttgatggcgaggtcgaaacgggttgcaagcgtcagcgatccttcgttgtcatccatctctttaataatggcgtcgtagtcgctgctcttcaccacgattgcgacatctttatggttcttggcggcggagcgcaccatcgttgggccgccgatatcgatgttctcaaccgcatcttccagcgagcaaccttcacgggccacggtctgggcgaacggatacaggttaacaaccaccatatcgataggctggatctgatgttcttccataatggcatcgtcctggccgcgacggcccagaatgccaccatgtactttcggatgcagggtcttcacgcgtccatccatcatctccgggaaaccggtgtaatcggaaacttcggttaccggcagacctttttctgctaacagacgggcagtgccccctgtagacagcagctccacaccgcgtgcggaaagtgcctgggcgaattcgacgataccggctttgtcagaaacactgagcagagcgcggcggactggacgacgttgttgcatggtaaatcccctggatttgactattacagagagcgttagctgaatttttcgcgaaaaactcagctaacgcccctaacggggcatccttatttttcgcccgcattgtaacgaaaacgtttgcgcaacgctcgcgaannnnnnnaattcgatggcgatcacgattttgcccccgattagcgtgggagaaatagagaaataacgctgatgattgtggataactctgtgcgtaaaaaggtataaagcggggttttgctggggaatgcagcagtcagtcatttttctgcaatttttctattgcggcctgcggagaactccctataatgcgcctccatcgacacggcggatgtgaatcacttcacacaaacagccggttcggttgaagagaaaaattctgaaattcagggttgactctgaaagaggaaagcgtaatatacgccacctcgcgacagtgagctgaaagccncgtcgcaactgctctttaacaatttatcagacaatctgtgtgggcactcgaagatacggattcttaacgtcgcaagacgaaaaatgaataccaagtctcaagagtgaacacgtaattcattacgaagtttaattctttgagcatcaaacttttaaattgaagagtttgatcatggctcagattgaacgctggcggcaggcctaacacatgcaagtcgaacggtaacaggaagaagcttgcttctttgctgacgagtggcggacgggtgagtaatgtctgggaaactgcctgatggagggggataactactggaaacggtagctaataccgcataacgtcgcaagaccaaagagggggaccttcgggcctcttgccatcggatgtgcccagatgggattagctagtangtggggtnncggctnnnnnaggcgacgatccctagctggtctgagaggatgaccagccacactggaactgagacacggtccagactcctacgggaggcagcagtggggaatattgcacaatgggcgcaagcctgatgcanccatgccgcgtgtatgnnnnaggccttcgggttgtaaagtactttcagcggggaggaagggagtaaagttaatacctttgctcattgacgttacccgcagaagaagcaccggctaactccgtgccagcagccgcggtaatacggagggtgcaagcgttaatcggaattactgggcgtaaagcgcacgcaggcggtttgttaagtcagatgtgaaatccccgggctcaacctgggaactgcatctgatactggcaagcttgagtctcgtanaggggggtagaattccaggtgtagcggtgaaatgcgtagagatctggaggaataccggtggcgnnngcnnnnccctggacgaagactgacgctcaggtgcgaaagcgtggggagcaaacaggattagataccctggtagtccacgccgtaaacgatgtcgacttggaggttgtgcccttgangcgtggcttccggagctaacgcgttaagtcgaccgcctggggagtacggccgcaaggttaaaactcaaatgaattgacgggggcccncacaagcggtggagcatgtggtttaattcgatgcaacgcgaagaaccttacctggtcttgacatccacngaactttncagagatnngaatgtgccttcgggaacngtgagacaggtgctgcatggctgtcgtcagctcgtgttgtgaaatgttgggttaagtcccgcaacgagcgcaacccttatcctttgttgccagcggtnnggccgggaactcaaaggagactgccagtgataaactggaggaaggtggggatgacgtcaagtcatcatggcccttacgaccagggctacacacgtgctacaatggcgcatacaaagagaagcgacctcgcgagagcaagcggacctcataaagtgcgtcgtagtccggattggagtctgcaactcgactccatgaagtcggaatcgctagtaatcgtggatcagaatgccacggtgaatacgttcccgggccttgtacacaccgcccgtcacaccatgggagtgngttgcaaaagaagtaggtagcttaaccttcgggagggcgcttaccactttgtgattcatgactggggtgaagtcgtaacaaggtaaccgtaggggaacctgcggttggatcacctccttaccttaaagaancgtnctttgcagtgctcacacagattgtctgatagaaagtgaaaagcaaggcgtcttgcgaagcagactgatacgtccccttcgtntagaggcccaggacaccgccctttcacggcggtaacaggggttcgaatcccctaggggacgccacttgctggtttgtgagtgaaagtcgccgaccttaatatctcaaaactcatcttcgggtgatgtttgagatatttgctctttaaaaatctggatcaagctgaaaattgaaacactgaacaacganagttgttcgtgagtctctcaaattttcgcaacacgatgatgaatcgaaagaaacatcttcgggttgtgaggttaagcgactaagcgtacacggtggatgccctggcagtcagaggcgatgaaggacgtgctaatctgcgataagcgtcggtaaggtgatatgaaccgttataaccggcgatttccgaannggnnannccanngtgtttcnnnnnnnnnnnattaactgaatccataggttaatgaggcgaaccgggggaactgaaacatctaagtaccccgaggaaaagaaatcaaccgagattcccccagtannnnnnnnnnnacggggaggagcccagagcctgaatcagtgtgtgtgttagtggaagcgtctggaaaggcgcgcgatacagggtgacagccccgtacacaaaaatgcacatnctgtgagctcgatgagtagggcgggacacgtggtatcctgtctgaatatggggnnaccatcctccaaggctaaatactcctgactgaccgatagtgaaccagtaccgtgagggaaaggcgaaaagaaccccggcgaggggagtgaaaaagaacctgaaaccgtgtacgtacaagcagtgggagcctcttttatggggtgactgcgtaccttttgtataatgggtcagcgacttatattctgnngcaaggttannnnannnggnnanncgaagggaaaccgagtcttaacngggcgttaanttgcagggtatagacccgaaacccggtgatctagccatgggcaggttgaaggttgggtaacactaactggaggaccgaaccgactaatgttgaaaaattagcggatgacttgtggctgggggtgaaaggccaatcaaaccgggagatagctggttctccccgaaagctatttaggtagcgcctcgtgaattcatctccgggggtagagcactgtttcggcaagggggtcatcccgacttaccaacccgatgcaaactgcgaataccggagaatgttatcacgggagacacacggcgggtgctaacgtccgtcgtgaagagggaaacaacccagaccgccagntaaggtcccaaagtcatggttaagtgggaaacgatgtgggaaggcccagacagccaggatgttggcttagaagcagccatcatttaaagaaagcgtaatagctcactggtcgagtcggcctgcgcggaagatgtaacgggnnnnaaccatgcaccgaagctgcggcagcgacactgtgtgttgttgggtaggggagcgttctgtaagcctgtgaaggtgtnctnnnnnnnntgntggaggtatcagaagtgcgaatgctgacataagtaacgataaagcgggtgaaaagcccgctcgccggaagaccaagggttcctgtccaacgttaatcggggcagggtgagtcgacccctaaggcgaggccgaaaggcgtagtcgatgggaaacaggttaatattcctgtacttggtgttactgcgaaggggggacggagaaggctatgttggccgggcgacggttgtcccggtttaagcgtgtaggctggttttccaggcaaatccggaaaatcaaggctgaggcgtgatgacgaggcactacggtgctgaagcaacaaatgccctgcttccaggaaaagcctctaagcatcaggtaacatcaaatcgtaccccaaaccgacacaggtggtcaggtagagaataccaaggcgcttgagagaactcgggtgaaggaactaggcaaaatggtgccgtaacttcgggagaaggcacgctgatatgtaggtgaagtccctcgcggatggagctgaaatcagtcgaagataccagctggctgcaactgtttattaaaaacacagcactgtgcaaacacgaaagtggacgtatacggtgtgacgcctgcccggtgccggaaggttaattgatggggtcngcgcaagcgaagctcttgatcgaagccccggtaaacggcggccgtaactataacggtcctaaggtagcgaaattccttgtcgggtaagttccgacctgcacgaatggcgtaatgatggccaggctgtctccacccgagactcagtgaaattgaactcgctgtgaanatgcagtgtacccgcggcaagacggaaagaccccgtgaacctttactatagcttgacactgaacattgagccttgatgtgtaggataggtgggangctttgaagtgtggacgccagtctgcatgganccgaccttgaaataccaccctntaatgtttgatgttctaacgtggacccgtgatccgggttgcggacagtgtctggtgggtagtttgactggggcggtctcctcctaaagagtaacggaggagcacgaaggttggctaatcctggtcggacatcaggaggttagtgcaatggcataagccagcttgactgcgagcgtgacggcgcgagcaggtgcgaaagcaggtcatagtgatccggtggttctgaatggaagggccatcgctcaacggataaaaggtactccggggataacaggctgataccgcccaagagttcatatcgacggcggtgtttggcacctcgatgtcggctcatcacatcctggggctgaagtaggtcccaagggtatggctgttcgccatttaaagtggtacgcgagctgggtttagaacgtcgtgagacagttcggtccctatctgccgtgggcgctggagaactgaggggggctgctcctagtacgagaggaccggagtggacgcatcactggtgttcgggttgtcatgccaatggcactgcccggtagctaaatgcggaagagataagtgctgaaagcatctaagcacgaaacttgccccgagatgagttctccctgaccctttaagggtcctgaaggaacgttgaagacgacgacgttgataggccgggtgtgtaagcgcagcgatgcgttgagctaaccggtactaatgaaccgtgaggcttaaccttacaacgccgaaggtgttttggcggatgagagaagattttcggcctgatacagattaaatcagaacgcagaagcggtctgataaaacagaatttgcctggcggccgtagcgcggtggtcccacctgaccccatgccgaactcagaagtgaaacgccgtagcgccgatggtagtgtggggtctccccatgcgagagtagggaactgccaggcatcaaataaagcgaaaggccatcctgacggatggcctttttgcgttggtgcaaaaaaatgccggatgcgacgctggcgcgttttatccagcttacgcaggcacgatagggggcagcttattcccccacatacgccagatccagcaacggatacggtttccccaaatcgtccacctcagagcgtcccgtaaccttaaaacccaccttcttatagaacccaaccgcctgctcattttgctcattaacattggttgtcagttccggggccattgagagcgcatgcttcaccagcatccggcccacgccgcagccgcgcacatcaggatcgataaacagcgcatccatatgctgcccacttaacaacataaacctaaccggctgatcccgttcattaaccgcgacccacaacggtgcttccggcagaaaggaacgaaccagctcttccagctcggcccgatactctgctgataaaaaatcgtgggtggcatcgacagatcgacaccaaatcgcaacgagttcctccccttcctcatgccgtgagcggcgaatactaataaccattttctctccttttagtcattcttatattctaacgtagtcttttccttgaaactttctcaccttcaacatgcaggctcgacattggcaaattttctggttatcttcagctatctggatgtctaaacgtataagcgtatgtagtgaggtaatcaggttatgccgattcgtgtgccggacgagctacccgccgtcaatttcttgcgtgaagaaaacgtctttgtgatgacaacttctcgtgcgtctggtcaggaaattcgtccacttaaggttctgatccttaacctgatgccgaagaagattgaaactgaaaatcagtttctgcgcctgctttcaaactcacctttgcaggtcgatattcagctgttgcgcatcgattcccgtgaatcgcgtaacacgcccgcagagcatctgaacaacttctactgtaactttgaagatattcaggaacagaactttgacggtctgattgtaaccggtgcgccgctgggcctggtggagtttaatgatgtcgcttactggccgcagatcaaacaggtgctggagtggtcgaaagatcacgtcacctcgacgctgtttgtctgctgggcggtacaggcagcgctcaatatcctctacggcattcctaagcaaactcgcaccgacaaactctctggcgtttacgagcatcatattctccatcctcatgcgcttctgacgcgtggctttgatgattcattcttggcaccgcattcgcgctatgctgactttccggcagcgttgattcgtgattacaccgatctggaaattctggcagagacggaagaaggggatgcatatctgtttgccagtaaagataagcgcattgcctttgtgacgggccatcccgaatatgatgcgcaaacgctggcgcaggaatatttccgcgatgtggaagccggactagacccggaagtaccgtataactatttcccgtacaatgatccgcaaaacaaaccgcgagcgagctggcgtagtcacggtaatttgctgtttaccaactggctcaactattacgtctaccagatcacgccatacgatctacggcacatgaatccaacgctggattaatcttctgtgatagtcgatcgttaagcgattcagcaccttacctcaggcaccttcgggtgccttttttatttccgaaacacacctcagtaggtgaataaattttattcatattgttatcaataagttatcaagtattttnaattaaaatggaaattgtttttgattttgatttttaaatgagtagtcttagttgtgctgaacgaaaagcgcacaacgatccttcgttcacagtggggaagttttcggatccatgacgaggagctgcacgatgactgaacaggcaacaacaaccgatgaactggctttcataaggccgtatggcgagcaggagaagcaaattcttactgccgaagcggtagaatttctgactgagctggtgacgcattttacgccacaacgcaataaacttctggcagcgcgcattcagcagcagcaagatattgataacggaacgttgcctgattttatttcggaaacagcttccattcgtgatgctgactggaaaattcgcgggattcctgcggacttagaagatcgccgcgtagagattaccggacccgtagagcgcaagatggtgatcaacgcgctcaacgccaatgtgaaagtctttatggccgatttcgaagattcactggcaccagactggaacaaagtgatcgacgggcaaattaacctgcgtgatgcggttaacggcaccatcagttacaccaatgaagcaggcaaaatttaccagctcaagcccaatccagcggttttgatttgtcgggtacgcggtctgcacttgccggaaaaacatgtcacctggcgtggtgaggcaatccccggcagcctgtttgattttgcgctctatttcttccacaactatcaggcactgttggcaaagggcagtggtccctatttctatctgccgaaaacccagtcctggcaggaagcggcctggtggagcgaagtcttcagctatgcagaagatcgctttaatctgccgcgcggcaccatcaaggcgacgttgctgattgaaacgctgcccgccgtgttccagatggatgaaatccttcacgcgctgcgtgaccatattgttggtctgaactgcggtcgttgggattacatcttcagctatatcaaaacgttgaaaaactatcccgatcgcgtcctgccagacagacaggcagtaacgatggataaaccattcctgaatgcttactcacgcctgttgattaaaacctgccataaacgcggtgcttttgcgatgggcggcatggcggcgtttattccgagcaaagatgaagagcacaataaccaggtgctcaacaaagtaaaagcggataaatcgctggaagccaataacggtcacgatggcacatggatcgctcacccaggccttgcggacacggcaatggcggtattcaacgacattctcggctcccgtaaaaatcagcttgaagtgatgcgcgaacaagacgcgccgattactgccgatcagctgctggcaccttgtgatggtgaacgcaccgaagaaggtatgcgcgccaacattcgcgtggctgtgcagtacatcgaagcatggatctccggcaacggctgcgtgccgatttatggcctgatggaagatgcggcgacggctgaaatttcccgtacctcaatctggcagtggatccatcatcaaaaaacgttgagcaatggcaaaccggtaactaaagccttgttccgccagatgctgggcgaagagatgaaagtcattgccagcgaactgggcgaagaacgtttctcccaggggcgttttgacgatgccgcacgcttgatggaacagatcaccacttccgatgagttaattgatttcctgaccctgccaggctaccgcctgttagcgtaaaccaccacataactatggagcatctgcacatgaaaacccgtacacaacaaattgaagaattacagaaagagtggactcaaccgcgttgggaaggaattactcgcccatacagcgcggaagatgtggtgaaattacgcggttcagtcaatcctgaatgcacgctggcgcaactgggcgcggcgaaaatgtggcgtctgctgcatggcgagtcgaaaaaaggctacatcaacagcctcggtgcactgactggcggtcaggcgctgcaacaggcgaaagcgggtattgaancggtctatctgtcgggatggcaggtagcggcggacgctaacctggcggccagcatgtatccggatcagtcgctctatccggcaaactcggtgccagctgtggtggagcggatcaacaacactttccgccgtgcggatcagatccaatggtccgcgggcattgagccgggcgatccgcgctatgtcgattacttcctgccgatcgttgccgacgcggaagccggttttggcggtgtcctgaatgcctttgaactgatgaaagcgatgattgaagccggtgcagcggcagttcacttcgaagatcagctggcgtcagtgaagaaatgcggtcacatgggcggcaaagttttggtgccaactcaggaagctattcagaaactggtcgcggcgcgtctggcagctgacgtgacgggcgttccaaccctgctggttgcacgtaccgatgctgatgcggcggatctgatcacctccgattgcgacccgtatgacagcgaatttattaccggcgagcgtaccagtgaaggcttcttccgtactcatgcgggcattgagcaagcgatcagccgtggcctggcgtatgcgccatatgctgacctggtatggtgtgaaacctccacgccggatctggaactggcgcgtcgctttgcggaagctatccacgcgaaatatccgggcaaactgctggcttataactgctcgccgtcgttcaactggcagaaaaacctcgacgacaacactattgccagcttccagcagcagctgtcggatatgggctacaagttccagttcatcaccctggcaggtatccacagcatgtggttcaacatgtttgatctggcaaacgcctatgcccagggcgagggtatgaagcactatgttgagaaagtgcagcagccggaattcgccgccgcgaaagatggctacaccttcgtatctcaccagcaggaagtgggtacaggttacttcgataaagtgacgaccattattcagggcggcacgtcgtcggttaccgcgctgactggctccaccgaagaatcgcagttctaagcaacctacaaacgttgctgactgtaggccggataaggcatatacgccgcatccggcaatcggtgcacgatgcctgatgcgacgcttgcgcgtcttatcatgcctacaaccgttgccgaacgtaggctggataaggcgtttacgccgcatccggcaattctctgctcctgatgagggcgctaaatgccgcgtggcctggaattactgattgctcaaaccattttgcaaggcttcgacgctcagtatggtcgattcctcgaagtgacttccggggcgcagcagcgtttcgaacaagccgactggcatgctgtccagcaggcgatgaaaaaccgtatccatctttacgatcatcacgttggtctggtcgtggagcaactgcgctgcattaccaacggccaaagcacggacgcggaatttttactgcgcgtcaaagagcattacacccggctgttgccggattacccgcgcttcgagattgcggagagcttttttaactccgtgtactgtcggttatttgaccaccgctcgcttactcccgagcggctttttatctttagctcccagccagagcgccgctttcgtaccattccccgcccgctggcgaaagactttcaccccgatcacggctgggaatctctgctgatgcgcgttatcagcgacctgccgttgcgtctgcactggcagaataaaagccgtgacatccattacattattcgccatctgacggaaacgttggggccagaaaacctctccaaaagtcatttacaggtggcgaacgaactgttttaccgtaataaagccgcctggctggtgggcaaactaataacgccttccggcacattgccatttttattgccgatccaccagacggatgacggcgaactgtttattgatacctgtctgacgacgaccgccgaagcgagcattgtttttggctttgcgcgttcttattttatggtttatgcgccgctgcccgcagcgctggtcgagtggttacgggaaattctgccaggtaaaaccaccgctgaattgtatatggctatcggctgccagaagcacgccaaaaccgaaagctaccgcgaatatctcgtttatctacagggctgtaatgagcagttcattgaagcgccgggtattcgtggcatggtgatgttggtgttcacgctgccgggctttgaccgtgtatttaaagtcatcaaagacaagttcgcgccgcagaaagagatgtctgccgctcacgttcgtgcctgctatcaactggtgaaagagcacgatcgcgtgggccgaatggcggacacccaggagtttgaaaactttgtgctggagaagcggcatatttccccggcattaatggaattactgctccaggaagcagcggaaaaaatcaccgatctcggcgaacaaattgtgattcgccatctttatattgagcggcggatggtgccgctcaatatctggctggaacaagtggaaggtcagcagctgcgcgacgccattgaagagtacggcaatgccattcgccagcttgccgctgctaacattttcccgggcgacatgctgtttaaaaacttcggtgtcacccgtcacgggcgtgtggttttttatgattacgatgaaatttgctacatgacggaagtgaatttccgcgatatcccgccgccgcgctacccggaagacgaacttgccagcgaaccgtggtacagcgtctcgccgggcgatgttttcccggaagagtttcgccattggctatgcgccgacccgcgtattggtccgctgtttgaagagatgcacgccgacctgttccgcgctgattactggcgcgcactacaaaaccgcatacgtgaagggcatgtggaagatgtttatgcgtatcggcgcaggcaaagatttagcgtacggtatggggagatgcttttttgagtaaagcttccatataatttttctccgcaatgtatcgagggttatccgtaaagccaaagctttcagccatcttatttaatgtattaaagattaattcagcaataacccggtgacccaattcacaagccaactcaaaggcagagtatttttgtggcgctttgtgttgccaaaaatccataatatcttcagcggtaaatccaaacaggcgtgcatggtcagataaagcaagataaaccatctctacaacgttttgctgtttatgctgtatcgctgaaaacaaacctgggtattcattagaattatttgccaggaggaggggcttcatattttttttatcgaatttaaacgtattaaacagagtgggtaatgcgttaaaaatagtattaataacgttcatatgtccgcgctgcatggccataaacaaacccgtgtcgcgcgcaagacttttagcggtcagaagatctacaatatcggaagctgaaatgttaatttcctgggccaggctgggcaatgcttcaagaataactttcacgatatcgctatgtccattttgcatcgccaggtatagtcctgggcaaccataaaaatcctttgccttcaggagatcgagtacctgttctttagtcaaatgacatgtgcgaattaacaaagataacgcgtccaaaacaattttcagcatgtcggcatcaccattcgccataacatggtataaaacatggctggacgtactatttttggcactcaggaatttatacacttgttcgttatctaaatgatgtgttgcggccagtttaggtaaggcgttcagaatcgaggttacaacatttttatccttacgtgatatcgctaaaaataatccagaaaaaccatttttatcttttgcctccagaatntgcatnagattttttttcgagagtaatccttcatatcctggctctgacaatgaattaaaaatagtctcaacgatatccgcattaccataatttatagccaaatataaaccggggaggttaatactattataggcagtcaacatttctgttctatgtagttctggcattttctggagttgaatcatcagttgcttaagttggtgattctgaccaattgccattagcaaattcatcgttgcaggtgataatggaggggttatttcatccacagatccttttagcatcaatagctgttcttttggaagtgctggaattattgcaacagattggttaataacatgatcatttgaccatttcaggaggctataatctacattcataaaatccatcagtgaatagtgtttaatatcctctttactttcgctcatgattcttattttatcgttagttacattaggatcataaaccgaaaccacgtaatggatacatccttcagttgtgttctttattcttagccggaccgtcaaagcatggttatctaccaataatatggcagccataacactgaggtcatttgattccatcttgtcaaaatatgccttcataactagcccgaaatcaccgcaggcagcaacgcaacgcccctcaggacggctggaaatcaacgccaaagtctggtttttgcattttttgttgaagtgagtgagaaatttttcagctgaagagtaatcatcttgatggggtttgtagtcaacattctgataaatatcattaatatattgtgcagcaatgtgtcggcatactatacggttttgggntngccccggaaaataacattgaccattaagcttaactcttgggaattctttttcttttctatctgagtttagatttaattcttttttatcaagagcgtctgagcgttgaggtaaaatttccattaggtattcttcaaatattggagcaatggtttgagtgagtgtcgtgttttcatttttattaattatcgtaatttctttcttatcagcttgtaagacagatatggaaaacttaatgacaaaatccttgttactaaagatatggcgaccattttgtctacagttctctgagaagctttttaatagaggtgtcgccagctccttgccagaaaatttatcctcgagttctttataaaacaattcactcagggtttggtgttcatttttctgggctgtattattaatatttgcagagaaagaactacgaggaatatgagtaatcatttaaatatctcattgtttattgatgtcttgaattttaactatcagaacagtgaaaaaatttaatatgattacaactaaataaatatcataaatcgctcaatctcataatgcagccgtaaaagtttcggtggaatgagatcttgcgattttgttaataattaagtggtttgatgtttaaaaataatgctgagttaataaaagtgtgtgaagtgtatgacaataagttattttgnnnnncaatgcgattaacagacacccttattctattaccactcaggtatgacgggcagaatattgcctctgcccgccagaaaaagtcagcgcattccaccgtacgccagcgtcacttccttcgccgctttaatcaccatcgcgccaaactcggtcacgcggtcatcggtaatacgtgaaatcggtccggaaatagaaattgcggcaaacggttcacggtgctcatcgaaaatacacgctgcaaggcaacgtagccccagcgcatgttcctcatcgtcaaatgaataaccccgtttgcgcgtttgggcgagatcttcttttaaatgcacaggagacaccagcgttgcgtgggtataggcatgtaaccctttgcggtgcagcagcttcgtcacctgttcttcgctcagttgggctaaaaaggctttacccgcaccggaagcgtgcatcggcaatttaccgccgataggcgcggacattcgcatcagatgcgtacactgtacctggtcgataataatcgcttcgtgatcgctttgatcaagcaccgccatattgaccgtttcgccagactcttccattagattgcgcaggatagggtgaacaattgctaacaaattacggctctggagaaagctgctgccgaccataaaggcatgtgcgccgattgcccagtgtcccagttcgccaacctgacgcacgaaaccctgctgttgcatcgtggttagcaggcggtgggtcgtggaattgggtaacccggcttgttgcgccagctccgtgagtgccacactgccattggattcggcaatccactccagtaatttcaggccacgcgttaaagactgaacctgtccagtcgctggtgcggtggcaacggcgggttttctgccgcgtttcgcgggaatgggtgcgaccatgacngtctcctttttctgtatcgtagaaatcattttcatttttattgttagctaatgcaatagttgctgaactgatccgatgagttaatgttgaacaaatctcatgttgcgtggtggtcgcttttaccacagatgcgtttatgccagtatggtttgttgaatttttattaaatctgggttgagcgtgtcgggagcaagtgtgagcagcaaagtggaacaactgcgtgcgcagttaaatgaacgtattctggtgctggacggcggtatgggcaccatgatccagagctatcgactgaacgaagccgattttcgtggtgaacgctttgccgactggccatgcgacctcaaaggcaataacgatctgctggtgctaagcaaaccggaagtgatcgccgctatccacaacgcctactttgaagcgggcgcggatatcatcgaaaccaacaccttcaactccacgaccattgcgatggcggattaccagatggaatccctgtcggcggaaatcaactttgnggcggcgaaactggcgcgcgcctgtgctgacgagtggaccgcgcgcacgccggagaaaccgcgctacgttgccggcgttctcggcccaaccaaccgcacggcgtccatttctccggacgtgaacgatccggcattccgcaacatcacttttgaccagctggtggcggcctatcgcgaatccaccaaagcattagtggaaggcggtgcggatctgattctgattgaaaccgttttcgacacccttaacgccaaagcggcggtctttgcggtgaaaacggagttcgaagcgttaggcgttgagctgccgattatgatctccggcaccatcaccgacgcctccgggcgcacgctctccggacagaccaccgaagcattttacaactccctgcgccatgccgaagccctgacttttggcctcaactgcgcgctggggccagatgaactgcgccagtacgtgcaggaactatcacggattgcggaatgctacgtcaccgcgcacccgaacgccgggctacccaacgcctttggtgagtacgatctcgacgccgacacgatggcaaaacagatacgtgaatgggcgcaagcgggttttctcaatatcgtcggcggctgctgtggcaccacgccacaacatattgcagcgatgagtcgtgcagtagaaggattagcgccgcgcaaactgcctgaaattcccgtagcctgccgtttgtccggcctggagccgctgaacattggcgacgatagcctgtttgtgaacgtgggtgaacgcaccaacgtcaccggttccgctaagttcaagcgcctgatcaaagaagagaaatacagcgaggcgctggatgtagcgcgtcagcaggtggaaaacggcgcgcagattatcgatatcaacatggatgaagggatgctcgatgccgaagcggcgatggtgcgttttctcaatctgattgccggtgaaccggatatcgctcgcgtgccgattatgatcgactcctcaaaatgggaggtcatcgaaaaggggctgaagtgtattcagggcaaaggcattgttaactctatctcaatgaaagagggcgtcgacgcctttatccatcatgcgaaactgttgcgtcgttacggtgcagcggtggtggtaatggcctttgacgaacaggggcaggccgatacccgcgcacggaaaattgagatttgccgtcgggcgtacaaaatcctcaccgaagaggttggcttcccgccagaagatatcatcttcgacccgaacatcttcgcggtcgccaccggcattgaagagcacaacaactatgcgcaggactttatcggcgcctgcgaagacatcaaacgcgaactgccgcacgcgctgatttccggcggcgtatctaacgtttctttctcattccgtggcaacgatccggtgcgcgaagccattcacgcggtgttcctctactacgctattcgcaatggcatggatatggggatcgtcaacgccgggcaactggcgatttacgacgacctgcccgctgaactgcgcgacgcggtggaagatgtgattcttaatcgtcgcgatgatggcactgagcgtttactggagcttgccgagaaatatcgcggcagcaaaaccgacgacaccgctaacgcccagcaggcggagtggcgctcgtgggaagtgaataaacgtctggaatactcgctggtcaaaggcattactgagtttatcgagcaggataccgaagaagcccgccagcaggctacgcgcccgattgaagtgattgaaggcccgctaatggacggcatgaacgtggtcggcgatctgttcggcgaagggaaaatgttcctgccacaggtggtcaaatcggcgcgtgtgatgaagcaggcagtggcctacctcgaaccgtttattgaagccagcaaagagcagggcaaaaccaacggcaagatggtgatcgccaccgtgaagggcgacgtccacgacatcggtaaaaatatcgttggtgtggtgctgcaatgtaacaactacgaaattgtcgatctcggcgttatggtgcctgcggaaaaaattctccgtaccgctaaagaagtgaatgctgatctgattggactttcggggcttatcacgccgtcgctggacgagatggttaacgtggcgaaagagatggagcgtcagggcttcaccattccgttactgatcggtggcgcgacgacctcaaaagcgcacacggcggtgaaaatcgagcagaactacagcggcccgacggtgtatgtgcagaatgcctcgcgcaccgttggtgtggtggcggcgctgctttccgatactcagcgcgatgattttgtcgctcgtacccgcaaggagtacgaaaccgtacgtattcagcacgggcgcaagaaaccacgcacaccaccggtcacgctggaagcggcgcgcgataacgacttcgcttttgactggcaggcttacannnnnnnnnnggcgcaccgtctcggcgtgcaggaagttgaagccagcatcgaaactctgcgtaattacatcgactggacaccgttctttatgacctggtcgctggccgggaagtatccgcgcattctggaagatgaagtggtgggcgttgaggcgcagcggctgtttaaagacgccaacgacatgctggataaattaagcgccgagaaaacgctgaatccgcgtggcgtggtgggcctgttcccggcaaaccgtgtgggcgatgacattgaaatctaccgtgacgaaacgcgcacccatgtgatcaacgtcagccaccatctgcgtcaacagaccgaaaaaacgggattcgctaactactgtctcgctgacttcgttgcgccgaagctttctggtaaagcagattacatcggcgcatttgccgtgactggcgggctggaagaggacgcactggctgatgcctttgaagcgcagcacgatgattacaacaaaatcatggtgaaagcgcttgccgaccgtttagccgaagcctttgcggagtatctccatgagcgtgtgcgtaaagtctactggggctatgcgccgaacgagaacctcagcaacgaagaactgatccgcgaaaactaccagggcatccgtccggcaccgggctacccggcctgcccggaacatacggaaaaagccaccatctgggagctgctggaagtggaaaaacataccggcatgaaactcacagaatctttcgccatgtggcccggtgcatcggtttcgggttggtatttcagccacccggacagcaagtactacgcggtggcgcaaattcagcgcgatcaggttgaagactatgcccgccgtaaaggtatgagcgtctccgatgttgagcgctggctggcaccgaatctggggtatgacgcggactgattcacaaatctgtcacttttccttacaacaaacagggcgctcaatgagtgccctgtctctttattaatatgaaacacttatactggaaacaggctggaataatcttagccggaaaaacgaatgtcaaaaggcacagtaaagatgccagtcagcgtgtttccggtcctttggtcattcaattgcttcaggaacatataacgataaggagaacctgaactcgtgttaacgctgcttcacctgctttctgccgtcgccctgctggtctgggggactcatattgttcgaaccggcgtaatgcgcgtcttcggcgcgcgtttgcgtactgtccttagccggagcgtcgaaannnnnnngctcgccttttgcgcggggatcggcgttaccgcactggtacagagcagtaatgccaccaccatgctggtgacctcgttcgtcgctcaggatctggtagccctcgcaccggctctggtcattgtgctgggggcagatgtcgggacggcgctaatggcgcgtattctcaccttcgacttatcctggctgtcaccgttacttatttttatcggcgtgatttttttcctcggacgcaaacagtcacgcgccgggcaactgggccgcgtcggtattggtcttgggctgattttgctggcgctggagttgattgtgcaggccgtaacgccgatcacccaggcaaacggcgttcaggtgatctttgcctcgctgaccggcgatattctgctggatgcgctgattggcgcgatgttcgccattatcagctactccagccttgctgctgtactgctgaccgcgactctgaccgccgcaggcattatctccttccccgtggcgctctgtctggtgattggtgctaacctcggttccggcctgctggcgatgctcaacaacagtgccgccaatgccgcagcccgccgtgtcgcgctgggtagtctgctgtttaagctggtgggtagcctgattatcctgccgtttgtccatttgctggcagagacaatggggaagttgtcattgccaaaagcggaactggtgatctatttccacgtcttctacaaccttgtacgttgcctggccatgctgccatttgttgacccgatggcacggttttgcaaaacgattattcgcgatgaaccggaactggatacccagctacggcctaaacatctggatgtcagcgcgctggatacgcccacgcttgctctggcgaacgcnnnnnnnnaaaccctgcncattggcgacgccatggaacagatgatggaagggctgaataaagtgatgcacggcgagccaaggcaggagaaagagctgcgtaagctggcagatgatatcaacgttctctataccgccattaagctgtatctggcgcggatgccaaaagaggaactggcagaagaagagtcgcgccgctgggcggagatcatcgaaatgtcgctcaaccttgaacaggcctccgatatcgtcgagcgcatgggtagtgaaattgccgacaaatcgctggctgcaaggcgagcattttcgcttgatggcttgaaggaactggatgcgctctatgagcaattgctcagtaatttaaagctggcaatgtcggtgttcttctctggcgatgtcaccagcgctcgtcgtttgcgccgcagcaagcatcgctttcgcattcttaatcgccgctattcccacgcccacgtcgatcgcctgcatcagcaaaacgtgcaaagcattgaaaccagttcgctacatttaggcttactgggagatatgcagcgtctgaactcgctgttttgttcggtggcttacagtgtgctggaacagcctgatgaagatgagggacgggacgagtattaatattgtgaatcctgtaggcctgataagacgcgtcaagcgtcgcatcaggcactatgaacaagatgccggatcatgcatccggcaattcacttaaaaacggtgaccagcttccagcggaaccgcttcttcaccggccttaaacacataggtggtattcgggccacccagcgttgcgtgacctttactcactgtgatccagttaccttccggtagaccaataatcgtcagttctggcgcgacgaccagcagttcgcgaatacgctgctcacgggtttcacctttatggccttccggcagcgcgttggtgaagtgcgggttgatttgcaacgggaacagatttagcgcatcgaaaccttgcggatcgacaatcggcatatcgttggtggtacgaatggttgggcaagcaaggttagcgcctgcgctccagccaatatacagcgcgccacgtttaaccacgtcagtaattggagccagcagcccgcgctcgcggcactgtttcagcaactggaaagtattaccgccgccgacaatcacaatttccgcattttcaatcgcggcaacgggatcgacaacgctatgaataccggtgacagaaacacccagcggagcgagaaccgcagccgttttcgctgtgtaatcatcccaggtctgcgttacgccagcgaaagggataaacaccgctgagcggcgaccctgcaactgttcagcaatcagcggcagtgcatgttccagccaggctttacccggcagcgtcgagttactcaataaaagcagttccattacttctctggttagtaagaaatcacggaaggcatgctaccactgcgaatttaaccacttactgacatggctcacgatgtcacgtattgcaccgggcgctgagactgatgacaaacacagcattgcctgatgcgctacgcttaccaggcctaccagataactgcaatatattgaattttcgagattatgtaggccgaataaggctttattccgcatccggcataaacaatgtgtactttgccaccaatttgagcgccccttaaggcgctgatgtttttttatccttctcgtgcacattgggccgcttcagcaatcagccgcacatcaggtcgcgaagttgccgcggtgaccagccagcgacatgcagagttaagtagcgcgattaatcatgggaaattgcctctgcatgagtgagcagatattgctccgcctcaccggaccagatcccctgatgacgcgccagaatcgccgccagtgcttgatcctgaatctgcgtgagtgacgtcagcggcaggtatttcccggtatacaccagctttttgccgccgccgacggcaggcaattcaagcgtggtttcgcccgcggcattcagcccaagaatatgtgttaccacttttgcggcctgcacttttttctcttcaatcaatttgaccgctgcgcgcatgtcgtcggtattgccgcctgacgtgcccacgtagtgggtaaatgcataatgcacatcgtagaaattaattggcgcgctgaaatgtttatcctgcggtccggcgaagaaattcaggcaaccatctgtcgccagcaaggaagaggcgagagtcaccagtccttcattaggcacaaagacgaaaatatcatcgaagccgtgaccgccactcagcgccattagcgtatcaaatgctgcatcggcggcattgagataatgaatcagtgtttgcggttctgatggatagtgcttgcgcgcataactcaatttatcgttgtcggtatcggtaatgacgagcagcgacgggttaacgggtccatgtagcgcataatcaatcgccaacagtcccattggtccggtgccgccgaggatcagcatgcgcccttgcgggcgaatccccatcgtgtggttataactaccttcctgaagatgatagttggcgttgaacgcgccaatcacgcaggaaagcggttcaaccagcgagccttcaaaataggtttcgccgtcgtatgccagcaggcaatcttgttccatgacctcgttgggaataaccacatgcgtggcctcgccgcctacccacgggaaggagtagccggggcagtccgggcggtcggggagttgcaggttggcctgaatcacataacgctgacccggctggaatttgtgctgccactttttacccacggccagaatatcgccgcaaaactcgtggccgatgatgattgggttggtcgccacatcgtcgggtacttttttatggttttcacccagattggcctctttccaggaagagaggcacaggctgtcagtgaccaccgtcgcgaggatttcatcctcctgcatttcaggaaggtcaaaggtttccaggcgtaaatcacgtttaccataaagacgcagagctgttgttttcataaaccacctcatgttgaacgatggccccggcagtcgtgccggggcgaagaatcaggacaggaagcccagcgcattgccgataatccctaagccaaacagggcgaaaatcagccataccgggttaatttttttgttgagcagacgaaccatcagtagcgtcagaccgagcgccagcaaaccagggcaaagttgatcgagaatgttctgcacggtcatggtgacggtggagccatcggcggcatgcgtttgtgaaaccaccaacggtacgttgattgacgtccatttggtgaccagcacgcccatcacaaacagtccgagaatcgacgcgccttcggtgagtttttgcagcacattcccgcccatatcgctgacgatattcacccctttgcgaaagccgagctgtaggccataccacttcatcgccagacgcaccgcgttgaaaataaagaagaacagcagcgggccgagaatgttgccagacagcgccagcgatgcgccgagcgcggcggtaatcgggcgcagcgttccccagaccagtggatcgccaacccctgccaatggtcccatcagaccgactttgatgccgttaatggtgccgtcatcaatttccgcgccgttggcccgcgcctcttccatggcggcagtgacgccgatgaccgggccacatacggctggcgtggtattaaagaacaccaggtgtcgcctgagcgccgcaacctgatcctcttttactgggtaaagtcgcttgatggcggggatcatgtcgtagcaaaaacccagcccgtgaatacgttcaaagttaaaggacgcctgttgcaggttggagcgcagaaacatgctcaccagatcgccgcgtgtaatttttctctgttccatgatggctccgttaatcgtcaagttggtcaagggcggtggaagcgggggccaggagttgaggttcagctttacgccactgtggatttagctggatgtagaccagggccatgatcacgccgacgccaccgaacgccagcagactgagatcgaggtagccacctgcgaggaaaccgaggaaaaagaaaggcatcaaatatttcacgcccatcatacgtagcaccatggcgtaaccgactaccacgataaaaccgccagcaatttgcagacctcgggtcacaaattcgggaatggcgtttaacatattgctcaccatatcggcgctgacgaacagcgagacaatcagtgccggaatggcgacgcgcagcgcctgcacgccaagcgcggagacatgcagaatatcgagagtgcgaaaccgtgcttcttccgctgctttatccgccgcgtgctggaacactacggtgatggtacgggcaaacaccgtcagcacctggcctgccgcagccacaggcaacgcgatggcgattccggtggcgatgctttgctgaccaacgataaccagaatggcggagattatgctggcgagtgcagaatccggagattgcgccgcgccgacgttcatccagccgagagctatcaattccagcgtaccaccgagtattattccggtttttaaatcaccgagaattaaaccaatcaccgtacaggcaattaacgggcgatgagtctgaaattcatccagcacgctgcccattccggcaatacaggaaaaaagaaatatagcaatgatttgtagggtacttatttccatgatttgtcaccttttaagtgtcgtcatccctgcctgttaaagcatatgtacacaggcgctattatttaatntgcgattaactgttcgtttattttgtagataatattgattgagggatctgacgctacgacgcgtaaatccagtatgacgcctagattatttaactcatgaaatgcgttaatatcatcatcatctaatgaaaccgctttggttaactgttttttaccgggccgccaggccatgccgccaatattcagggtgcctatttttaccccctggcgaaccatcgctaaggcatcctgtgggcgagtgaaaagataaaaaacggtttcgtcctgatattgcgggttgtgataaaccgcgacggctttttcaatattgaccacgttaaccttcattcccggtggcgcagcctgacgcaataatgtccggcgaacttcatcgttataaacttcgtcattgcagataataatgcgctgggcgttagccactttcgaccagacggtagtgacctgaccgtggatcaggcggtcatcaatgcgggcgagcgtaatgttcatcagaaatcctcctctgtcgttgccagttgtttccagacaacgcaggtttgctttgcgatttgcgtcaggtgttcacacagttcatcaacattcatgctgtcctggttatcaaccagttcgagcgccagcggcagagaaagtccgctgattacccgcagacgaggattgcgcatcgcaagcatcgctgccgcattccacgggctgccgcactgtaaatccacggcaatcagccactcattttgattgtgaatgcttactaacttttccagctttgctacgatgtctccggcgttttcaccgggcacaaattcaacggcttcaacattggcgttgccgtaaaccatctgaaccgattccagcatggcgcaagctaatttgccgtgggcacaaaaaatggcgttgaccataaagcctccttagccgcgcgttttgccgcccgcaatgttagtggttactccggtgatatagctggcgcgttcagacagcagataacaaacaaaatcagcgatttctgctaatcttccgnnnngcccaataggaatggcgtttttggtatagccttcacgcagctgctcgacggtgatattgcgcgtccacgccagcgcctcttcatattccggcgtgcgtagcccggttttttccagaatccccggcgcgataccgaccacacggatacngtgtttacccagctctttcgaccaggagcgcgtgaagctattgagcgcggctttggtagcggcgtaacagctttggccttctgagccttccagcccactttctgaggaaacattcacaatcacgccatcatgttgtttgaccatctgtcgcgccaccgcctgcgacatcagaaaaacgcctttctggttgatattgaccattttttcgaatgcagcttcgttgagttcatactgcccggcaggcgctttctcatcgaccagcagacgcgggaaattgaccccggcgttattgaccagaccgtcgatgcgaccaaaacgctggataatttccgctaccgtatgatttacctctttggcgctggaaatatcggtcggccaaaactgatagcctttatgaccttcatattgtccatcgccaccgtgaatatctaccatctgtacgtttgcgccttgtgctaataattcctctacaatcgccagaccaataccggatgcgccgccggtgacgataatgattttatcctgcaaatttaaccacgtttgcataacagactcctgattttagataatagggacccgccgtaatttttattacgataaacatcgggaagatttttatttcagtaatagttcagctgtgctgctattcgttaccagacaattaatatattttccacgcagtgcaccaataattccgctgtatttttcttcactcatggcaatgccaatggaatatcgtgcctgctttaatttattcatttcgatagagagtgttttttcgctcatattcgtttcaaccatttcgccgtgaatatcaaaaaagcgcgagcaaatatcgccagcaacctggcgggcattcaggtcgtcactctcttcaccaccataaaacgcatgccagttagcgccgtcncgaatggccggtgagccaattcccaccagggcgacatccagattatcccagtaggcagagatggttttaaagtgctgagactgcatgatcccattacgaattaatgggttatccagtagagccggaaaatccgcgagatgcgattcccctttcagcttcgctgccgcgctgtaggttaatgtgtttacgtgatagcggctttcgagtttaccggacggtccgccaataattggtacgcagattaactgccgcgattgccccgcctgcggcaagttttcaaccagtgcgctcaccgcgcgaccccaggaaaaaccgacaatatcgccaggctccagcaagcgatccagcagttgcgcgccgtgtaaccccatcatcgccagttgagtctcttcatcctcatcatttcccgacaccaccacaacgtctttcaggccaaacttttgcttcagttgctgctccagccagagattttcgttgtagtcatagttgatggcgatggtgacaattccctgatcgcggcctcgtttaagcaagcggctgatggtggtgcggtaaatacccagttcgcgnnngatttgcgcctgcgtcatatcctgttcgtaatagagttgggcaatcttcacaatcaaacggatatcgtcactgttttccattgccgcctcctggttctgcacatttgtgcaaatacgctttctcaccgcttgatctgatataaccccatcatgatggcctttcaaagcgatttttcactctttgcatggggagaaatagcgctttctcttgcacatttgtttctctgcgcagtagttatcagcacaggtgtgcagcgattcgtaatatgttgattatccttattttgccacgcaaatttgcattgtacttccggagacacttttgtgataaaaggcgtggcagatcacatttaatttcgacgttgccgcataaccctgtttttccccgctaagaggtacggtatattccgcgttttacaggagaatttatgctgcccgactcatcagtccgtttaaataaatacatcagcgaaagcggaatttgctcacgccgcgaagcggatcgctatatcgagcaaggcaatgtgttccttaatggcaagcgagccaccattggcgatcaggtgaaacccggcgacgttgtgaaagtaaacggtcagttgattgagcctcgggaagccgaagatttggtacttatcgccctgaacaagcccgtaggcattgtcagcaccaccgaagatggcgagcgcgataacattgtcgatttcgttaaccacagcaaacgcgtgttcccgattggccgcctggataaagactcccaggggctgattttcctcaccaatcacggcgatctggtgaataagatcctccgtgcgggtaacgatcatgagaaagagtatctggtgacggtcgataaaccgattaccgatgaatttattcgtggtatgggggcgggggtgccgatcctcgggacggtgactaaaaagtgcaaagtcaaaaaagaagcgccgtttgtcttccgcattaccctggtgcaggggctgaaccgtcagatccggcgcatgtgcgagcatttcggctatgaagtgaaaaagctggaacgtacgcgcattatgaacgtcagcttaagcggcattccgctgggggagtggcgcgatttaaccgacgatgagttaatcgacctctttaagctcatcgaaaattcctcttccgaggcaaaacctaaagcgaaggccaaaccgaaaacagcgggcatcaaacgtccagtcgttaagatggaaaaaacggcggaaaaaggcggtcgcccggcgtccaacggtaagngttttacctcgccggggcgaaaaaagaaggggcgctaatcagcgcctgccgcgcgtcgacgtatttgctgaccagctaaatgacgcttcaggatccggtttataagcctgctttttctttaactggcgggcttttttcgcttcagcctcacgctcgaccattaatttatcgatgtactctttcttaatgctgttggtttcggagttggtcagtacgcgaccatgcgcaatccgcgcccgatccagcagtgttttaagttcacgctgctcgcgttcagtcatctctttttgggtaatacgggggagtgccatgatggtgccctcagtgagccagagagttcagtgtacgggaattcgtttgcgagcagaactgataatattcattttgccttctcttaactatttatctctttcgataattaattagagatgcagataaaaaaattaaaggcaattattctccgataaagacgctggttaacagagtacaggctcgtttattgatgagcatagtgacaagaaaatcaatacggcccgaaatatagcttccaggccatacagtatttactcaaacaaattactatgcagtttttgcaccacctgctcggcatcttcgccgggcaccaggaagcacaggttatggctggatgcgccgtaacaaatcatgcgaatgttgaacggttccagtacgccgaatacctctttgccaacgccgcaggcttttgacaggtcattgccaatcaacgcgaccagcgccagaccttcttccacctccacccggcacagtgcggaaagctccatcagcagagattgcgtcagcaacgtatcgccagtggaggttgaaccggtggtatcaagggttaatgccacgctcacttctgacgtggtgattaagtctaccgaaatattatgccgcgcgaggatgccgaaaacttccgcgaggaaaccgcgagaatgcagcatattcaggctgtgcaaagtgagcagagtctgattgcgacgaagcgccagcgcgcggaacagcggcggattttcagttttattgcacaccagcgtaccacctgcgcgtgggtctttgctggagccgacaaagactgggatatcgctgcgtactgcgggtagcaacgttgccggatgcagtacttttgcaccaaaagttgccatctctgccgcttcggcaaacgcgatttcatcaatgcgttttgctgcggaaactacgcgtggatcggtggtgtagatgcccgggacgtcggtccagatatcaacacgagatgcgtgtaaagcctccgccagcaaggctgccgtataatcgctgcctccacggccaagcgtcgttgtacgacctttattttcgctaccgataaatccctgggtgatcactaagccttcattgagacgtgggagcagctgcagcgcggccagttccgccagcgcggctacatctggctctgcacgaccaaatcggtcgttggtacgcatcactttacgtacatcaaaccactgtgcctgaacatcgcgttcgcgcaggatctcgacaaacagcagggtcgacatcagctcgccgtggctgaccagttcatctgtcagcgccggagacgttgccagcgccgccgcttctgccagaacagtaatgttctccagcagacgttcaatctcttcacggataacgttcgggtaacgcagacgttccagaatggcaaactggatgttgcgaatagcgtcgagtttttcgaatcgctcgccaggttccagtccttccgctaaagcgaccagcagattagtgataccagcagaagccgagaggacaactaaacgcacgttggcatcagaaagcacaatatcagcgctgcggttcatggcgtcaaaatcagctacgctggtaccgccaaatttggagacaacaatttcagacataactacctcgtgtcaggggatccattttcagccttggcacaagggaagagcggaagacgggtgggcgcagagcgatacttcgctactnttttcacccagaagtgctccaccacttgcgaaacgcccgactgcgaacgcttctggtgacaacccaggggattcagcccctgtagccgatgatgaacgtggccagccgttcaatcacctcggcgatgcaccccctcaggtgttatcacaggactggctcctccaacaccgttacttgggcaacgcgcctcttctggcctgcgctagcgcaggtagtacatttataaataaagggtgagcggggcggttgtcaacgacggggtcatgcggatttttcatccactcctggcggtcagtagttcagctaataaatgcttcactgcgctaagggtttacactcaacattacgctaacggcactaaaaccatcacatttttctgtgactggcgctacaatcttccaaagtcacaattctcaaaatcagaagagtattgctaatgaaaaacatcaatccaacgcagaccgctgcctggcaggcactacagaaacacttcgatgaaatgaaagacgttacgatcgccgatctttttgctaaagacggcgatcgtttttctaagttctccgcaaccttcgacgatcagatgctggtggattactccaaaaaccgcatcactgaagagacgctggcgaaattacaagatctggcgaaagagtgcgatctggcgggcgcgattaagtcgatgttctctggcgagaagatcaaccgcactgaaaaccgcgccgtgctgcacgtagcgctgcgtaatcgtagcaataccccgattctggttgatggcaaagatgttatgccagaagtcaacgcggtgctggagaagatgaaaaccttctcggaagcgattatctccggtgagtggaagggttataccggcaaagcaatcactgacgtagtgaacatcgggatcggcggttctgacctcggcccgtacatggtgaccgaagcactgcgtccgtacaaaaatcacctgaacatgcactttgtttctaacgtcgatgggactcacatcgctgaagtgctgaaaaaagtaaacccggaaaccacgctgttcctggtagcatctaaaaccttcaccactcaggaaaccatgaccaacgcccatagcgcgcgtgactggttcctgaaagcggcaggtgatgaaaaacacgttgcgaaacactttgcggcgctctcaaccaatgccaaagccgttggcgagtttggtattgatactgccaacatgttcgagttctgggactgggtcggcggtcgttactctttgtggtcagcgattggcctgtcgattgttctctccatcggctttgataacttcgttgaactgctttctggcgcacacgcgatggacaagcatttctccaccacgcctgccgagaaaaacctgcctgtactgttggcgctgattggcatctggtacaacaatttctttggtgcggaaactgaagcgattctgccgtatgaccagtatatgcaccgtttcgcggcgtacttccagcagggcaatatggagtccaacggtaagtatgttgaccgtaacggtaacgttgtggattaccagactggcccgattatctggggtgaaccaggcactaacggtcagcacgcgttctaccagctgatccaccagggaaccaaaatggtaccgtgcgatttcatcgctccggctatcacccataacccgctctctgatcaccaccagaaactgctgtctaacttcttcgcccagaccgaagcgctggcgtttggtaaatcccgcgaagtggttgagcaggaatatcgcgatcagggtaaagatccggcaacgcttgactacgtggtgccgttcaaagtgttcgaaggtaaccgcccgaccaactctatcctgttgcgcgaaatcactccgttcagcctgggtgcgttgattgcgctgtatgagcacaaaatctttactcagggcgtgatcctgaacatcttcaccttcgaccagtggggcgtggaactgggtaaacagctggcgaaccgtattctgccagagctgaaagatgataaagaaatcagcagccacgatagctcgaccaatggtctgattaaccgctataaagcgtggcgcggttaatcatcgttcatgcctgatgccgctatgtangccggataaggcgtttacgccgcatccggcaactggtgcctgatgcgacgctttacgcgtcttatcaggcctacaggtcgatgccgatatgtacatcgtattcggcaattaatgcatagcacgattaattaaataaccttaaaaacaatgccgactataagtcggcattgttttatcagataaatccccttgtctgtgatttaacggaaatcataccgtgaggttaatcctaaaatagatttttaatcgtgattgatttcggaaaatactcagattaattacttttacttttattttaacactatgatttttaatgttatttatatataagttgtagcttatatttgatattcattccaattatcctaaaaccccatctctaattccccgcgccgtaattcgcatgctttagttgtgtatactcgatcccgcccgaaatgtttttgggtaaatctccattcattcaatgaagggaaattgttatgaaaaaagttctgtatggcatttttgccatatctgcgcttgcggcgacttctgcgtgggctgcacctgtacaggtgggcgaagcggcagggtcggcagcaacgtcggtttcggcggggagttcctccgcgaccagcgtcagcaccgtaagctcggcggtgggtgtcgcgctcgcggcaaccggtggcggtgatggttctaataccgggaccaccacaaccacgaccaccagtacccagtaataaagtatgtatccccaaaataattcgagtcattgcatctgtggctagaagtatgaagggatttaccataaccacactccggtgtggttattctgcccctctggagaagagtcgtgaagcgacctgcattcattcttatctgcctgctattacaggcctgttcagccacgactaaagagctgggcaattcactgtgggacagtctgttcggcacgccaggcgtacagctgacggacgatgatattcaaaatatgccntacgccagccagtacatgcagcttaatggtgggccgcagttgtttgtggtgctggccttcgctgaagacggacaacaaaaatgggtcactcaggatcaggccactctcgtcacacaacatggtcgtctggtgaagactttgcttggcggcgacaacctgattgaagtgaataaccttgccgccgacccgctgattaaacccgcacaaatcattgatggcgcaacctggatgcgcacgatgggctggaccgagtaccagcaggtacgctacgccaccgcacgctcagtcttcaaatgggatggcaccggtaccgttaaggtcggcagcgatgaaaccgcggttcgcgtgctggacgaagaagtctccaccgaccaggcgcgctggcataaccgctattggatcgacagcggagggcaaattcgccagtcggaacagtatctcggcgcggattatttcccggtgaaaaccactctcatcaaggcggcaaaacaatgattaaacaaactattgtcgcgttgcttttgagtgtgggagcgtcatcggtcttcgcggcaggaaccgtcaaggtgttcagcaatggcagcagtgaggccaaaacgctaacgggcgcagagcatttaatcgatctggtaggccaaccgcggctggcaaacagctggtggcctggtgcggtgattagcgaagagctggcaacggcggcagcattgcgtcagcagcaggcgttgctgacacggctggcagaacagggcgcagattccagcgccgacgatgccgctgcgattaacgccttacgccagcaaattcaggcgttgaaggtgacgggcaggcaaaaaatcaatcttgatcccgatatcgtccgcgttgctgaacgcgctaacccgccgttgcagggcaactacacgctgtgggtcggaccaccaccgtccacggtcacgttgttcgggcttatcagccgtcctggcaatcagccattcactcccggtcgcgacgtggcgagctatctctccgggcaaagtctgcttagcggtgcggatcgtagctacgcgtgggtggtttacccggacggacgcacacaaaaagcgccggtggcttactggaacaagcgtcacgtagagccgatgcccggcagcattatttatgttggcctcgcggactccgtctggagtgagatgcctgatgcccttaacgccgacattcttcagactctgacgcagcggatacctcaataatgaaaaaaagacatctgcttagcttactggcgctgggcattagcacagcttgctacggcgaaacatatcctgcgcccattggtccgtcgcagtcggatttcggtggcgtaggattattacaaacgcccacggctcgcatggcgcgggaaggggagttgagtctgaactatcgcgataacgatcagtaccgttattactcagcttcagtgcaactcttcccgtggctggaaacaacgctgcgctacaccgacgtgcgcacncggcagtacagcagcgtcgaagcgttctctggcgatcaaacgtataaagataaagccttcgatctcaaactgcgtttgtgggaagagagttactggctgccgcaagtggcggttggtgcgcgggatatcggcggtacggggctgtttgatgcggaatatcttgttgccagcaaagcctgggggccgttcgattttacgcttggcctgggctggggatatttgggcacaagcggtaatgtgaaaaatccgctctgttcagccagtgataaatattgctatcgcgataacagctacaaacaggcgggatctatcgacggtngccagatgttccacggtcctgcctcactgtttggcggcgtggaataccagacgccctggcaaccgctgcgcctgaaactggagtatgaaggcaataattatcagcaggattttgccggtaagctggagcaaaaaagtaagtttaacgtcggggcgatttatcgcgttaccgattgggccgacgttaaccttagctatgaacgtggcaacacctttatgtttggcgtcacgctgcgcaccaactttaacgatctgcncccgtcttacaacgataacgcccgcccgcaatatcaaccgcagccgcaggatgccattttgcagcattcggtggtggcgaatcagttaacgctgttgaaatacaatgccggacttgccgatccgcagatccaggcgaaaggcgatacgctgtatgttaccggcgagcaggtgaaatatcgtgattcgcgcgaagggatcgttcgtgctaatcggatcgtgatgaatgatctgccggatgggatcaagacgatccgcgttacggaaaatcgccttaacatgccgcaggtgacgacggaaacggatgtcgccagcctgaaaaatcatctcgccggagagccgttgggccacgaaacgaagctggcgcaaaaacgcgtcgagccagtggttccgaagtccaccgagcagggctggtatatcgacaaatcgcgctttgatttccatatcgatccggtgctgaaccagtcggtcggtggcccggaaaacttttacatgtatcagctgggcgtgatgggaacggcagatttgtggctgacggaccatctgctgaccaccggcagcctgtttgcaaatcttgccaacaactacgacaagtttaactacaccaatccgccgcaggactcgcacttaccgcgcgtgcgtacccatgtgcgcgagtatgtgcagaacgatgtctatgtgaataacctgcaagccaactacttccagcatctgggcaacggcttctacggtcaggtctacggaggttatctcgaaaccatgtttggcggtgcgggggcagaagtgttgtatcgcccgctggacagcaactgggcgtttggtctggatgccaactacgttaaacagcgcgactggcgtagtgcaaaggatatgatgaaattcaccgactacagcgtgaaaaccggacatctgaccgcctactggacgccatctttcgctcaggatgtgttagttaaagccagcgtcgggcagtatctggcaggggataaaggcggcacgctggagatcgctaaacgctttgacagcggcgtggtggtgggcggctatgccacgatcaccaacgtttcgaaagaggagtacggcgaaggggacttcaccaaaggcgtgtatgtctctgtaccgttggatctcttctcgtctggcccgacacgcagccgtgcggcgattggctggacgccgctgacgcgtgncggtggtcagcaacttgggcgtaagttccagttgtatgacatgaccagcgaccgtagcgtcaatttccgntaagtcatgggaaaggtgccagttttcgcaatcactggcacctttattcttaatggcctgttgagccatcaggaacgcagttcacccccggtttgcgatctggtgtgtaaaggcgaaaacattctgtcttcctgtccgtcgatatcggttgcaggtctggttgcctgagcgactgggccatcattgggctggagacattgctttgcggtaggtcggctttatcagcagtaccgagcggaccagcataagcaggaagaacagagactgataacatcaaagcagcaaaataaggcttcatttttaccacctttatcaggttacgtttcatttgttccagaggaacattgtcgatttttcgcgcattgctggtggctgggaatcacctgaatgggtgatttttgaattaccggctttggtgcggtttgtcttgccggatgcgccgccaggcgcggcttatccggcctacgggtaggtatatccggctttggtggaggcgcgctccaaatccaggttgaacaaaacatacacaaaaaatatagatctccgtcacatttttgcgttatacaggaagctcgccactgtgaaggaggtactgctatgacgtcactctctcgtccgcgcgtggagtttatctccaccattttgcagaccgtactcaatcttggcctgctgtgcctcggccttattttggttgtcttcctcggcaaagaaacggtgcatctggctgatgtgctgttcgcgccagaacaagccagcaaatatgagctggtagaaggactggtggtttactttctctatttcgaatttatcgcgctgattgtgaagtactttcagtccggttttcacttcccgctacgttactttgtctatattgggatcaccgccattgtgcgcttgatcatcgtcgatcataaatcgccactggatgtgttgatctactcggctgcgatcctgttactggtggtcaccctgtggctgtgtaattcgaaacggctgaagcgggagtaaaaagacagcacgccgaactggcgcggcgtgctggacaggaagattacagcgtagcagtttgttgtgttttcttcgtttccggttcccagagggcttccagctcctcaagggttttacctttggtttccgggacaaatttccacataaacagtgctgccagaacgcccatacaaccgtaaatccagtaggagaaaccgttgtggaaatgggccaccagccaggagtttttgtccatcatcgggaaggtccaggagacgaagtagttcgccagccactgggccgccaccgcgattgccagcgctttacctcgaatagcattcgggaagatttccgacagcagtacccagcataccggaccccaggacatggcaaaggcggcaacatagaacagcatcgacagtagcgccacaatacccggtgcctgagtgtaaaacgcggtaccgaggctaaacataccgattgccattccgagtgcgccgataatttgcagtggcttacgaccaaatttatccaccgtcataattgccagaacggtgaaggtgaggttgataactccgacaataatggtctgcaacagcgcgatatccgtgctggcccccagcgttttgaacacttccggcgcgtagtacagcaccacattgatgccgacaaattgctggaagatggagagcataacgccgatgacaatcacgcccacgccaaacatcagcagacgaccaccggttttgcggccatgatccagggagtgtttaatttcctgtactgcctgagttgcaagcgtgttgcccataattttgcgcaggataccttccgcctgttcttgcttgccgcgtgacatcagccagcgaggactttctggcacggtatacagcagcattaagaacagcagtgcagggatacattccgaggcaaacatataacgccagccgtcagtattcagccagctggcatcaccggaacgcgcaataaaatagtttacgcagtaaactaaaagctgcccgaaaataatcgcaaactggttaaatgaaaccagtttcccgcgaatatgagcaggagcaagttccgcaatatacattggtgaaagcattgaggctaaaccaacgccaataccgccaataatacgataaataacaaattccgggacataacctgccagataaacaggcactgtgttgtccgggtttatagaggtaaaaccaagttctggccaggcagaacctacaccagaaataaaaaacaggacagcagcaatcttaagtgaatcacgacgaccgaagcggttactgcaataaccaccgagggcaccgccgatgatgcaaccaatcagagcgctggccacgcaaaaccctaacagggagttggcagcggattcacttaagttttgtggagcaacaaagacggtattgagtgactcaacagtaccggaaataacggcggtgtcgtagccaaataataaaccacctaatgtagcgactaaggtaatcgaaaatatataactggaattatactgggtattcattcagacctgccttagaccattctgatcttttatcagtgcattgatgttggaattgtcaggcagttaaggcaattatcattttttacaatgcgtttacgtaatgtcttttctgtgatcttaattgtgataattatccaaaattgataaaaacaatactattgccgtgactcagagcacgaaagagaattatcgtaagtgggaaaacaaataacgtaaaaataataagctctatgatggaaatattaaccggcgaacaattcagattgcagacgaaagaaaaaaaggcgctccgtggagcgccgaataacagtcacaagttgggataacgtaagttgagggtgcagcggcataacattggcagaacaacatctttaacctttcacaccacctgccgtcaggccgttgaccagccagcgttgagccagcaagaagacgatggtgatcggtaatgcagacatcacggcagcggcggcaaagtcaccccacaggtagttttgcggattgaggtattgctgcatccccacggccagggtgtagctgtttacgtcacgcagtaacagcgacgcgaccggaacttcagtaatggcagcgataaacgacaggatgaataccaccgccagaatcggtactgacagcggcaacaggacaaggcggaaggcctgccacggtgtcgcaccatccagcgcagccgcttcttccagcgaactgtcgatggtttcgaaatagcctttgatggtccagacgtgcagcgcaatcccacccagatacgcgaaaattacgccgccgtgagtattcaggccaatgaatggaatgtactcacccagacgatcaaacaacgcatacaacgcgaccagtgaaagtactgccgggaacatctggaaaatcagcattcctttcagcagcgtcgctttgcctggaaagcgcatacgggcgaaagcgtaggcgcaggtggtggagagcgccacaatgccaatcgcggaaatcccggcgacctttaccgagttccacagccacagcagcaccgggaatggcggtggcgtaatgcgaccatcagcctgttccacgctaaaacctaatgccagtttccagtgatcccaggagatttgctccgggatcaggctgccggtcgcaaagttcccctggcgcagtgagatagcgacgaccatcagcagcgggaacataatcgccgcgataaaaagtagcagtagcaggtgagtaataaacaaacgtgctttttgcgatttcggttggaccattgccatttttgttatctcccttaatcaaacttcattcgcgtggctttcaggttcactatcgccagcgcacccaccagcaggaagatcagcgtggcaattgctgctgccagaccgaagtcctgacccccgccgccttcaaaagcgatgcggtaggtgtagttaacaagcaggtcggtataaccggctggcgtggtcgtgccaagacgatccgggccgccgttggttaacagttgaatcagcacgaagttgttaaagttaaaggcgaagctggcgatcatcagcggcgtcagcggtttaatcagcagcggcagcgtaatcttaaagaagttctggaacggacctgcgccatccattgctgaggcttcatacaaatcgtccggaatcgctttcagcaagcccatgcagaggatcatcatgtacggatagcccagccaggtattgacgataatcagcatcgttcgggcggtggtcggatcgctgaaccaggcgggcttcacgccaaacagcgcgctcaacatcatgttgatctcaccgaagctctggttaaacaaccctttgaaaatcaagattgaaatgaacgatggcaccgcgtagggcagaatcagcaggacgcgatagaccgctttgccncgcaacgcttcccactgcaccagacacgccagaaccatgccgactgccaccgttaaaaagacagtgatcagcgagaacaccacggtccagacgaaaatggcgaggaacggtttctgaatgccttcgtcggtgaagacgcgagtaaagtttttccagccggtggtcacggtgtaaccggggcttagcttttcatcaccccagttgccgtcggcggtaatggactggtaaaagccaatttggttattcggacgatatttcacgccgctctgattattcgtcaacgtgccgtcaccgtcgagtgtgtagagcggctgcgtgccagaaaactggcgcagggagctcatcatcactttgttgccatccggcagaatggcggtaatgtcactcagcgcctgacgattctgggtaatcacgcgtagatttgcgcgttcgccttcgggctgggcggtcgtttctttcagttgcagtttttgctctccgccaaatttaaaagcgtcggagaggtaatttttgccggtttcgccgtcgctgagcgccagttgccactcatcgcccgccgggtaaagaccanagttataggttttgcctgcttgccaggagcgatctaacaacacttcctgtgcacgttcaaaagtcagctggttagtgctgctgtagttggtgaaggcaatggcgatggtgcagaccagagggaagaggacgaataatcccattccagccattcccgggtaaacatagcgccaggcgtaggctttacgattggcgaaaatatacagccccgctgaactcaatatcagcgtggtaatggcgaacaggtattccccttgtgcgtacattaaaacaacaaggtaacccaccagcaggccgagcagacctaacactgaccatttcagcgcgtcgctttgccaccaatgtttctttttaatgacatccatggggttcttcctcattccaggacggataaggctttcatgccttatccgacaacaactgcctgatgcgacgctgacgcgtcttatcaggcctacatacgtttcggttttgtaggccggacaaggcgttcacgccgcatccggcatttcacagcattacttggtgatacgagtctgcgcgtctttcagggcttcatcgacagtctgacgaccgctggcggcgttgatcaccgcagtacgcacggcataccagaaagcggacatctgcgggatgttcggcatgatttcacctttctgggcgttttccatggtggctgcaatacgtggatctttcgccaactcttcctcgtaagacttcagcgctacggcacccagcggtttgtctttattaaccgcttccagaccttcgtcagtcagcagatagttttcgaggaactctttcgccagctctttgttcggactggcggcgttaataccggcgctcagcacgccaacgaacggtttagatggttgacccttgaaggtcggcagtaccgttacaccataattcactttgctggtgtcgatgttggaccatgcccacgggccgttgatagtcatcgctgtttcgcctntattaaaggcagcttctgcgatggagtaatcggtgtctgcattcatgtgtttgtttttaatcaggtcaaccaggaaggtcagacccgctttcgcgccagcgttatccacgcccacgtctttaatgtcgtacttgccgttttcatacttgaacgcataacccccgtcagcagcaatcagcggccaggtgaagtacggttcttgcaggttgaacatcagcgcgctcttacctttcgctttcagttctttatccagcgccgggatctcttcccaggtttttggcgggttcggtagcagatctttgttataaatcagcgataacgcttcaacagcgatcgggtaagcaatcagcttgccgttgtaacgtacggcatcccaggtaaacggatacagcttgtcctggaacgctttgtccggggtgatttcagccaacaggccagattgagcgtagccaccaaagcggtcgtgcgcccagaagataatgtcagggccatcgccagttgccgcaacctgagggaatttctcttccagtttatccggatgctcaacggtgactttaattccggtatctttctcgaatttcttaccgacttcagcgagaccgttatagcctttatcgccgttaatccagattaccagtttaccttcttcgattttggcgagagccgaggcggaaaacatcatcgtcgttaatgcggataatgcgaggatgcgtgcacctgtttttattttcataatctatggtccttgttggtgaagtgctcgtgaaaacacctaaacggactctagtttctttatacggcaacctctttccatcctccttgcccctacgccccaccgttgctttgtgtgatctctgttacagaattggcagtaatgtggagatgcgcacataaaatcgccacgatttttgcaagcaacatcacgaaattccttacatgacctcggtttagttcacagaagccgcgttctcatcctcccgcctcctcccccataaaaaagccagggggtggaggatttaagccatctcctgatgacgcatagtcagcccatcatgaatgttgctgtcgatgacaggttgttacaaagggagaagggcatggcgagcgtacagctgcaaaatgtaacgaaagcctggggcgaggtcgtggtatcgaaagatatcaatctcgatatccatgaaggtgaattcgtggtgtttgtcggaccgtctggctgcggtaaatcgactttactgcgcatgattgccgggcttgagacgatcaccagcggcgacctgttcatcggtgagaaacggatgaatgacactccgccagcagaacgtggcgttggtatggtgtttcagtcctacgcgctctatccccacctgtcagtagcagaaaacatgtcatttggcctgaaactggcaggcgcaaaaaaagaggtgattaaccaacgcgtcaaccaggtggcggaagtgctacaactggcgcatttgctggatcgcaaaccgaaagcgctctccggtggtcagcgtcagcgtgtggcgattggccgtacgctggtggccgagccaagcgtatttttgctcgatgaaccgctctccaacctcgatgctgcactgcgtgtgcaaatgcgtatcgaaatctcccgtctgcataaacgcctgggccgcacaatgatttacgtcacccacgatcaggtcgaagcgatgacgctggccgacaaaatcgtggtgctggacgccggtcgcgtggcgcaggttgggaaaccgctggagctgtaccactatccggcagaccgttttgtcgccggatttatcggttcgccaaagatgaacttcctgccggtaaaagtgaccgccaccgcaatcgatcaagtgcaggtggagctgccgatgccaaatcgtcagcaagtctggctgccagttgaaagccgtgatgtccaggttggagccaatatgtcgctgggtattcgcccggaacatctactgccgagtgatatcgctgacgtcatccttgagggtgaagttcaggtcgtcgagcaactcggcaacgaaacccaaatccatatccagatcccttccattcgtcaaaacctggtgtaccgccagaacgacgtggtgttggtagaagaaggtgccacattcgctatcggcctgccgccagagcgttgccatctgttccgtgaggatggcactgcatgtcgtcgactgcataaggagccgggcgtttaagcaccccacaaaacacacaaagcctgtcacaggtgatgtgaaaaaagaaaagcaatgactcaggagatagaatgatgattactctgcgcaaacttcctctggcggttgccgtcgcagcgggcgtaatgtctgctcaggcaatggctgttgatttccacggctatgcacgttccggtattggctggacaggtagcggcggtgaacaacagtgtttccagactaccggtgctcaaagtaaataccgtcttggcaacgaatgtgaaacttatgctgaattaaaattgggtcaggaagtgtggaaagagggcgataagagcttctatttcgacactaacgtggcctattccgtcgcgcaacagaatgactgggaagctaccgacccggccttccgtgaagcaaacgtgcagggtaaaaacctgatcgaatggctgccaggctccaccatctgggcaggtaagcgcttctaccaacgtcatgacgttcatatgatcgacttctactactgggatatttctggtcctggtgccggtctggaaaacatcgatgttggcttcggtaaactctctctggcagcaacccgctcctctgaagcaggtggttcttcctctttcgccagcaacaatatttatgactataccaacgaaaccgcgaacgacgttttcgatgtgcgtttagcgcagatggaagtcaacccgggcggcacattagaactgggtgtcgactacggtcgtgccaacctgcgtgataactatcgtctggttgatggcgcatcgaaagacggctggttattcactgctgaacatactcagagtgtcctgaagggctttaacaagtttgttgttcagtacgctactgactcgatgacctcgcagggtaaaggtctgtcgcagggttctggcgttgcatttgataacgaaaaatttgcctacaatatcaacaacaacggtcacatgctgcgtatcctcgaccacggtgcgatctccatgggcgacaactgggacatgatgtacgtgggtatgtaccaggatatcaactgggataacgacaacggcaccaagtggtggaccgtcggtattcgcccgatgtacaagtggacgccaatcatgagcaccgtgatggaaatcggctacgacaacgtcgaatcccagcgcaccggcgacaagaacaatcagtacaaaattaccctcgcacaacaatggcaggctggcgacagcatctggtcacgcccggctattcgtgtcttcgcaacctacgccaagtgggatgagaaatggggttacgactacaacggcgatagcaaggttaacccgaactacggcaaagccgttcctgctgatttcaacggcggcagcttcggtcgtggcgacagcgacgagtggaccttcggtgcccagatggaaatctggtggtaatagcaaaacctgggccggataaggcgtttacgccgcatccggcataaaacaggttgtcattatctgaaaggggcgaaagcccctctgattatcgggtttagcnnnntattgcctggctaccgctgagctccagattttgaggtgaaaacaatgaaaatgaataaaagtctcatcgccctctgtttatcagcagggttactggcaagcgcgcctggaatcagccttgccgatgttaactacgtaccgcaaaacaccagcgacgcgccagccattccatctgccgcgctgcaacaactcacctggacaccggtcgatcaatctaaaacccagaccacccaactggcgaccggcggccaacaactgaacgttcccggcatcagtggtccggttgctgcgtacagcgtcccggcaaacattggcgaactgaccctgacgctgaccagcgaagtgaacaaacaaaccagcgtttttgcgccgaacgtgctgattcttgatcagaacatgaccccatcagccttcttccccagcagttatttcacctaccaggaaccaggcgtgatgagtgcagatcggctggaaggcgttatgcgcctgacaccggcgttggggcagcaaaaactttatgttctggtctttaccacggaaaaagatctccagcagacgacccaactgntcgacccggctaaagcctatgccaaaggcgttggtaactcgatcccggatattcccgatccggttgctcgtcataccaccgatggcttactgaaactgaaagtgaaaacgaactccagctccagcgtgttggtcgggcctttatttggttcttccgctccagctccggttacggtaggcaacacggcggcaccagctgtggctgcncccgctccggtgccggtgaagaaaagcgagccgatgctcaacgacacggaaagttattttaataccgcgatcaaaaacgctgtcgcgaaaggtgatgttgataaggcgttaaaactgcttgatgaagctgaacgcctgggatcgacatctgcccgttccacctttatcagcagtgtaaaaggcaaggggtaattacgccccacagtgctgattttgcaacaactggtgcgtctcctggcgcacctttttttatgcttcattccagggatatgagcgattttttatagtaactcacttcttcttcactaagaatatccattatctcaannnnntatcagagattcttttcctttcgccggtagtgtctggacgctcaggctactttttccagttatttcatttctgtaatgcagaggttttatgttaggtcatatctcaaagtttgacggcaataactctttgataaaacatggtgtggtgcaaggaaataatatagtagattttgatttactacgtaattttaatggggggccagggttaaatcgagaaaactttatttatatcagcannnnnnnnnnnnatataaaacaacggaacgaaaaaaatcattcaataaatatgtttcgtgaagtctcaatcagtggtgatattgtaagcgtaaaattttatagaaatgaaaaaatagaatgcgcttgtgattttatgatggctaaagatgcgcaggggtatatcgacctgtctgaattggatttaacaagttgtcattttaaaggtgacgttatttcgaaggtgtctttcatatcatcaaatctacaacatgtaacattcgaatgtaaagaaattggggattgcaattttactactgcaatagttgataatgtcatatttaaatgtcgacgtttacacaatgtaatttttatcaaagcgagtggtgattatgtcgattttagcaaaaatattcttgatacagttgacttctcgcagagtcaacttactcatagtaatttttgtgaatgtcagattagaaattcaaacttcgatcattgttatctttatgcttcgcacttcaccagagcagaatttcttactgacaaagaaatatcatttattaaatcgaatttaacagctgttatgtttgatcatgtgcgaatatcgacagggaattttaaaggcagcgttacacaactaatggtattatctattgattactcagatatatttggaaatgaatatctcgatggttatatcaataacattataaaaatgattgattcgttgccagatgatccagcgatattgaaatccgttctggcagtaaaactggtgatgcaattaaaaattcttaatattgttaataaaaactttattgagaatatgaagaaaatatttagccatggtccttatataaaagatcccattatacgtagttatatccatcctgatgaagataacaagttcgataattttatgcgtcaaaatcgattcagtaaggtgaatttcgatacccaacagatgatcgattttattaacagatttaatatgaataaatggctgattgatcgaaataacaatttttttatccaacttatcgatcaggctctacgatcaacgaatgatacgatcaaagaaaatgcnnnnnnnctttataaagagtggattcgtagtgatgatgtttcacctttatttatagaaattgaagataatttaagaacctttaacacgaatgaattaacacgaaacgataatatctttatcttgttctcctctgtcgatgatgggccagttatggtggtaagctcccagcgcttacatgatatgttgaatcctacaaaagataccaattggaattccacgtatatctataaatccagacatgagatgttgcctgttaatcttactccggaaacacttttcggctccaaatcttatgataaacatgcgcttttccccatttttactgcgagttggcgagctaatcgtataaagaataaaggtatttaagtaaaggaaaacatcaccgctcttggcatcatgggcggtgatgcccctatggttgccctcgccagcacgggcatcggcaaagcgtaaggttcaacagcgttttaccacttcatgcgattgttgcgtttttgttgcgcattagatcacttaatttgctttacatctcccgtaaacacttttctgcgatacaatgcctttacgttatgtaacggagagttcggcatgtcacaccccgcgttaacgcaactgcgtgcgctgcgctattgtaaagagatccctgccttggagccgcaactgctcgactggctgttgctggaagattccatgacaaaacgttttgaacagcagggaaaaacggtgagcgtgacgatgatccgcgaagggtttgtcgagcagaatgaaatccccgaagaactgccgctgctgccgaaagagtctcgttactggttacgtgaaattttgttatgtgccgatggtgaaccgtggcttgccggtcgtaccgtcgttcctgtgtcaacgttaagcgggccggagctggcgttacaaaaattgggtaaaacgccgttaggacgctatctgttcacatcatcgacattaacccgggactttattgagataggccgtgatgccggactgtgggggcgacgttcccgcttgcgattaagcggtaaaccgctgttgctaacagaactgtttttaccggcgtcaccgttgtactaagaggaaaaaaatatggagtggagtctgacgcagaataagctgctggcgtttcatcgcttaatgcgtacggataagccaattggcgcgttactgctgctctggccaacattatgggcgttgtgggtggcgacaccgggcgttccccagctctggatcctggcggtgtttgtcgcgggtgtctggctgatgcgcgctgccggatgtgtggtgaatgattatgctgaccgcaagtttgatggtcatgttaagcgcacggcgaaccgaccacttcccagcggcgcggtaacagagaaagaggcgcgcgcgctgtttgtagtgctggtactgatttngtttttactggtgctgacgctgaatacgatgaccattctgttgtcgattgccgcgctagcgctggcgtgggtgtacccgtttatgaagcggtatacccatctaccgcaagtggtgctgggcgcggcgtttggctggtcgattccaatggcttttgctgctgtgagtgagtcggtgccattgagttgctggttaatgttcctcgccaatattntctgggcggtggcttacgacacgcagtatgcgatggttgaccgtgatgatgatgtgaagattggcattaaatccaccgcaatcctgttcggccaatacgataaattgattattggtattttgcagattggcgtactggcgctgatggcgattatcggtgagttaaatggcttaggctggggatattactggtcaattctggtggctggcgcgctgtttgtttatcaacaaaaactgattgccaaccgcgagcgcgaagcctgctttaaagcatttatgaataataactatgttggtctggtactgtttttagggctggcaatgagttactggcatttctgatgatgtaaaaaagccggatgatcatccggctttcttctgggttgcctgatgcgctgcgcttctcaggcctacacaacagatcgcaatttattgaatttgcagattatggaaggccggataaggcgtttgcgccgcatccggcaattctctctgattacccttcgccctgcgtcgcactctcaatcgtcaaacgcacgtctgatgtaatcaactccgccagcaactgataaaccttcatcgtttctgccggttcggcatcgccgctatcgctgatatacccttcatcacgcagcgtaagcaccagagaactgaacaccgccttgtcgaagaactccggcgcgttgatgccgtgcagcacggagagacgttgcgcgacggtgcggctctctttctccagcgtaccgcggttgatcgacgggttggcgctcaacagccagaaggtgatggcataacgttgcagcgtttcgcgcgcgcctgcggcgagcagctgtagcgtgcgagaatgcaccgggttgatatgcaactcatcatcttgcagggtaatcagcccctgacgttgcatctcatttgccagcgcatcaataacgtccggcaactcgtcgcgatcccagcgcaggaacagctccgctttcagcattgggtaaagcacattgacgtgctccatcaatacgtcgcgggagatgtggcgatgctgggtgacaattgccgccatcagcgaaggtagcaccaacatatgcgcaatgttgttgcgatagtaggtcatcagcaccgcttgctcgcgcggcagaatgatgatgtcgccgatagtgtctttctcaacttcaaacttgttcatttgcagcgcgtgatcgataagctcgctggcgctggctgaaggaacggtagagtccgtggagtaaggcacgttgcgcatcagatccaggtagcagttgagttgctcggttaactgctcgcgggtgagtgagcgctgacgtgatgccagtagcgcagtacagcacaggttcatggcgtttgccgcgcctgcgttgttaatgcgtaccatcagatcggcagcaatattattgaccgtcggcgttaaccatgccggacgcactgcttcgatgggatcgatagattcacgccagtctggtacgtgctggttaaggtaggtcatcaacggcattggttcaccgaaattgacgtaaccctggccgagattacgcagcttgcttaaaccgcgcagcatctgcggcaggctctctttctctttcgtcgcgccgcgcagttctttggcgtaagtacccacttccatgacgtgctcataaccgatatagatcggaatcagcgtaatcggacgcgtgccgccacgcagcntcgcctgaatggtcatngacagcgtaccggttttcggatccagcaaacgccccgtacgggaacgaccgccttctacgaagtactcgacggaataaccacggctgaacagttcgccgagatactcacggaaaacggtggaatagagcttattgcctttaaaagtacggcgaataaagaacgcacccagacggcggaaaatcggcccggcaggccagaaattcaggttgatcccggcggcgatatgcggcggcactagcccctggtggtacagcacgtaagaaagcagcaggtagtccatgtgactgcggtggcaaggcacatataccagctcatgaccgtcgtgggccagctggcgaacgcgctcggcgttatggacgttgatgccctggtaaaggcggttccaggtaaagcccagaatacggtcagtcaggcggatcatctcgtaagagaaattcgccgcaatctcttccatcagcgcaatcgcgttctgctgcgctttttcatgggagatttttttgctgcgcgcttcatcttctaccgctttggcaatggcgcgggaggcgagcagcttattaaacagatcctgacgagcaggcagacgtggtcctacggcagccagacgttgacgggcaaagtgcatacgcgccacgcgcgccagtttctgcgcgatagttttatccgtgccgtgttcatccgccatacggcgcagcgaaactgacggcgagaaacgcacaaaactgtcgcgaccgagccacagtacagcgaaaaatttctgtacgccgttaagcatacgcagcggcgggttcacttcgcctttttcacgccccggcgcgcgaccaaacatcaccgacactggcaccatctgcacatccagatttgggttgctacggtgcaaatcgagatagtcgtggaacagcttaatagactcttctttcggcgtgtaataggtgaatacacgcggcccgccgtgaatgaacacatagcgcggcagtagcgtgccgtcgatttccagcggctctaacgggtcaggcaagtcatgtgccagacactgggcgcgcaacgtcagcaaatctgctttcgagttgtacggtaaaacgtacataattggacgagaggtatccagccccagttccggggcaggatctgccggaatagacttgctttttaccaggatgcttaatggtaaattcagtaatttgtagtaaattcgtggccagccggacataaacgatgtaaagcctctggttaataatgcaaatgcgcggcaaggatagcagaaagtcatgggaaattctgtggtatccgctcatgtttcgcgcggcgttacgcaaacccgaatcatcggatttaacggtacactgatattgacgctcataatgtaaaaaggttctttcaatggccaataataccactggattcacccgaataatcaaagctgctggctattcctggaaaggtttacgcgctgcatggatcaacgaagcggcattccgtcaggaaggcgtagcggtattgttggcggtggtcatcgcctgctggctggatgtggacgcgattacccgcgtgctgcttatcagctccgtgatgctggtgatgattgtggaaatcctcaatagcgccatcgaagcagtggttgaccgaattggctctgaataccatgagctttccggacgcgctaaagatatgggatccgccgcggtgctgattgcgattatcgtcgccgtgattacctggtgcatcctgttatggtcgcattttggataacccttccagaattcgataaatctctggtttattgtgcagtttatggttccaaaatcgccttttgctgtatatactcacagcataactgtatatacacccagggggcggaatgaaagcgttaacggccaggcaacaagaggtgtttgatctcatccgtgatcacatcagccagacaggtatgccgccgacgcgtgcggaaatcgcgcagcgtttggggttccgttccccaaacgcggctgaagaacatctgaaggcgctggcacgcaaaggcgtaattgaaattgtttccggcgcatcacgcgggattcgtctgttgcaggaagaggaagaagggttgccactggtaggtcgtgtggctgccggtgaaccgcttctggcgcaacagcatattgaaggtcattatcaggtcgatccttccttgttcaagccgaatgctgatttcctgctgcgcgtcagcgggatgtcgatgaaagatatcggcattatggatggcgacttgctggcagtgcataaaactcaggatgtacgtaacggtcaggtcgttgtcgcacgtattgatgacgaagttaccgttaagcgcctgaaaaaacagggcaataaagtcgaactgttgccagaaaatagcgagtttaaaccaattgtcgttgaccttcgtcagcagagcttcaccattgaagggctggcggttggcgttattcgcaacggcgactggctgtaacatatctctgagaccgcgatgccgcttggcgtcgcggtttgtttttcatctctcttcatcaggcttgtctgcatggcattcctcacttcatctgataaagcactttggcatctcgccttacccatgattttctccaatatcactgttccgttgctgggactggtcgatacggcggttattggtcatcttgatagtccggtttatttgggcggcgtggcggttggtgcaacngcgaccagctttctctttatgctgttgctgtttttacgcatgagcaccaccgggctgactgcgcaggcttatggtgccaaaaatcctcaggcattagcccgtgcgctggtgcaacctttgctgttggcgttgggggctggggcgttaattgcgctgctgcgtacgccgattatcgatctggcgctgcatattgttggcggtagtgaagcagtcctggaacaggcgcggcgctttcttgaaatccgctggttaagcgcaccggcgtcgctggcgaatctggtattacttggttggttactcggcgtgcaatatgcccgtgcgccagtaattttgttagtggtcggcaatatcctcaacattgtgctggatgtctggctggtgatgggactgcatatgaacgtgcggggcgcggcgctggcgacggttattgcggaatatgcaacattgctgattggtctgctaatggtgcgtaaaatcctcaaactacgcggaatctccggcgaaatgctgaaaactgcctggcgaggaaacttccgtcgcttgctggcacttaaccgcgatatcatgctgcgctcgctgttgttgcaactctgtttcggcgcgatcaccgtacttggcgcgcgactggggagtgacattatcgctgttaacgcggttctgatgacgctactcacctttaccgcctatgcgctggacggttttgcctacgcggttgaagcacattccggtcaggcatacggtgcgcgcgacggtagccagttgctggatgtctggcgggcagcatgccgccagtcggggatcgtagcgttactgttttcggtggtttatttgctggcaggggaacacatcattgcgttactgacgtcgttaacccagattcagcagctggccgaccgctatcttatctggcaggtgattttgccgttggtcggcgtctggtgttatctgctggacggcatgtttataggcgcaacgcgtgctgctgaaatgcgtaacagtatggcggtggccgccgcaggttttgcgctgacgctccttacgctgccgtggttgggtaatcatggtttgtggttggcgttaaccgtctttctggcgttgcgcgggctttctctggcagctatctggcggcgtcactggcgcaacggtacctggtttgccgcaacgtgacggttaaaaattctgaataaataatcctaagccaaattgctgactacacttaatctcacgttcagaagaaaagtgaacgtactctcattcacaacctaacgatgaggtcttgattatgaataaagatgaagccggcggtaactggaaacagtttaaaggtaaagtgaaagagcaatggggcaaactgaccgatgatgatatgacgatcattgaaggtaaacgtgatcaactggtcggtaaaatccaggaacgttatggttatcagaaagatcaggcagaaaaagaggtcgtggattgggaaacccgcaatgaatatcgctggtaattaatccctcctgcccgacgtgtacaaggatgtacgccctcttaacgcggtttctttttcacctgcacagagtgatcatgctggcactgttcaggatgacgacacgcttccanttccatgcatgccgcacagagcccatgtgcttcaatcacattatgccgcagggcaaaccccatttttgccgccagcgtatgcatgatgtcttccacgccttctgcacattcttctttcaccgcgccgcagcgatcgcaaataaacatagctgacgtatgggtgggctggtcgaacagatggcagagcacataactgttggtggattccaccttatgcacaaaaccttgctcaagcagaaaatccagcgcgcgataaaccgttggcggcttggcttgcggttcagcttcgcgcagcaaatcaagcagatcataagcgctgatagcgccatcctgcagactcatcaggcgcaacacttccaggcgctgtggggtcaggcgcacattacgctgcgcgnagattttgtcagcctgcgctaataactcctgcgttgtggtcttttccatcgggcacctcaaagtgggggttaagaatgtccttactttaccatgttccaggaaaaacaccgagaacccttattgttgccgtaatgttgcttttctgttttgtaggtaagatgttgtgttgcctggcagtaccattatcaacacgataataattaataattcatttttaaataaattgcttcaagttaactcgctatttatttaaccgtggctaatcgtatacccgaatttcagaaaattatgagcgatttttgatagttaccggttccaaaaacacttataaggaggacacggtacgacaaaaaaggtagatgaatcatgttaaagataatacccggtgcaacaggatactttaataaaacactcaattcaaatcaattcgataatgaagatgcaatcaaaggtaaagtaaatagtatatatggtaaatctattgattattcaacgatgcgtcatcgggatataattattgcaaaaatagatttatttattcaaagaatcactcataatttatggactgcacgtgaaaaaaatgtgacgttaattaagcaaataaacgatctcaaaatgtgtgtcaatgagtatattggagattgtactgatgaggaattaaacggtcgtgaatttattgcatcagttgttgacagggctatttttcatttcgcgattaatagtatatgtaatcccgaggataataaagatgcgacactcatagaacgatgtacttttgatgtagaaaccaagaatggtcttccctccacggttcagctattttatgaggaatctaaagataatgaacctttagcgaatatacatttgcaagcaataggttctggtttcttaacgtttgttaatgccagccaggaacatgatgacaacagcttaaaattatttgcttcgctgttaatttccctttcatattctagtgtctactcagattttgcaggaagagtgaatattaatgaatataatgataactacctgaaagctcagtttgaagaattatctcaacgtgatatgaagaagtacctgggagagatgaagcgtctggcagatgggggagaaatgaattttgatggctatctggataagatgtcacatctggtgaatgaaggaacgctcgcccctgatattttaagcaaaatgcgagatgctgcaccgaaattaattgactttgctaagtcgtttgacccaaactcaaaggaaaagattaaaatatatacnggcacttctaannnnattnntgatttattcggggttaaatcggagaaataatatgtgaagttcttcgatggtatgaaaggtattacataaaagaacccaatgcttattgggttctttttttctctatcagtgctattagcagggagagatatcaccggagtttaatgtgtgatttttatttatcgtcgaatctgtattgtttatcattgcttttcacaacgctaacatctaataagattagatattcacttcgtgagagcttcatgccttgagaggatctcaattttcttttgcaatgagacaggcgcttcctgttgttatggtatagtaccccgttattgagcctcctgaacagtgatgctgaataacataaccacatgatatatcgataaaataatctctacatttgaaaatgcacggtaattctgaaatgcaaaaaatcaaccaaaccagcgcaatgcctgaaaaaactgacgttcactggagtggtcggtttagcgttgcaccaatgctcgactggacggacagacattgccgctatttcttgcgtctgctttcccgcaatacgttgctgtataccgaaatggtgactacaggggcgattattcacggtaaaggtgattacctggcgtacagtgaagaagaacatccggtagcgttgcaactcggcggtagcgatccggcggcgctggcgcagtgtgcgaagctggcagaagcgcgtggatatgatgagatcaacctgaatgtcggctgcccgtctgaccgggtgcagaacggcatgtttggtgcgtgtctgatgggtaatgcgcagctggttgccgactgcgtgaaagcgatgcgcgatgtggtgtcgattccggtgacggtgaaaacgcgtattggcatcgatgaccaggacagctatgaatttctctgcgatttcatcaacaccgtttccggcaaaggcgagtgtgagatgttcatcatccacgcacgtaaagcctggctttcggggttaagcccgaaagaaaaccgtgaaatcccgccgctcgattatccgcgtgtgtatcaactgaagcgtgactttccgcatctgacgatgtcgattaacggtggtatcaagtcgctggaagaggctaaagcgcatttgcaacatatggatggcgtgatggtcgggcgcgaagcgtatcagaatccgggtattctggcggcggtagaccgagagatctttggttcctcggataccgatgccgatccggtggcggtagtgcgcgccatgtatccgtacattgagcgtgaactcagccaggggacgtatcttggccatattacccggcatatgttgggcttgttccanggtattcctggcgcgcggcagtggcggcgttatttaagtgaaaatgcccataaagcgggtgcagacattaacgtgctggaacacgcgctcaaactggtggcggataagcgttaacttttcaccaaaaagtagtcaaattcaccacgccctgcgcaccgtcgcggggcgttttgctgttaaatcaatagattatttttggcatgattcttgtaatgcctgcaagagatttcatatttgggagagcatcatgctggaactactttttgtgattggcttttttgtcatgttgatggtcaccggcgtttcgttgctgggcattatcgccgcgctggttgtggcgacggccattatgttcctcggcggtatgctggcattgatgattaagttgctgccgtggttactcctggcgattgcggtggtgtgggttattaaggcgattaaagcaccaaaagtgccgaaatatcagcgttatgaccgctggcgttactaagggattgtgcggatgatcacaacctaaggttttatccttagaacaaaataggaattgataatcaaatctgtcactattgcgcctcnaacagattcatcgtgctgtaccctacatacagccgaactataaaaagaaagggcttcccaggtggaagccctatttattttatggaatcaacaggctggaaccttgcgtcgcgnggctttccagaatctcatgcgcacgctgcgcatccttcagcggatatttctgctgctcggcgacatcgaccttaatcacaccgctggcaatcaaagagaacagttcattactggcctcggttaattcctcccgcgtggtgatatagccttgcagggaagggcgtgtcacatacaacgagcctttctgattgagaatgcctaagttcacaccggtaaccgcacctgatgagttgccaaaactcaccattaagccgcggcgttgcaggcaatccagcgaccgttcccaggtgtctctgcccacggaatcgtacactacgcgcacttttttaccaccggtgatctcttttaaccgctcgaccagattctcttcacgatagttaataacctgccatgcgcccgcttttagcgcgctctgnnnnttttgcgcggttcctacggtgccgataagtttcgcgcccagggcttttgcccactggcaggcaatcaagccaacgccgccagctgctgcgtggaacaggaactgttcatcgggtttaatttcataggttttgcgcagcagataataaaccgttaagcctttcaggaaagatgctgcagcttgctcaaaagaaattgccgcaggcagaatcgccgctttatccgcattaatgttatgcacagagctgtaagcgcctaacgccgactgcgcatagactacacgatcgcctgccttaatatgctttacaccactgccgactttactcacgatgcctgccgcttcggtacctaatccgctgggtagtgatggcggcgggtaaaggccgctgcggatatacgtgtcgataaaattgatgccgatggctttattttcgacctggatttcattctccgccggatcggcaggagtgaactctacggcttgaagtacttccgggccaccgtgcttgtgaaattcaattcgtgttgccatgtgtcctccagaacgtatcgtcagggtctgcttcatatggtaaagtttcgacccattctttatctcggtaactccattcactatggcaggaaataaacccttcaacaaacagcaggctgaaccccgcgaacgcgatccacaagttgccgggctgaaagtgcctccgcactcgatcgaagcggagcagtcggtgttgggcggtttaatgctggataacgaacgctgggatgatgtagccgagcgtgtggtagcagacgatttttacacccgcccacaccgtcatatctttactgaaatggcgcgtttgcaggaaagcggtagtcctatcgatctgattacccttgcggaatcgctggaacgccaggggcaactcgatagcgtcggtggttttgcttatctggcagagttgtcaaaaaatacgccaagtgctgcgaacatcagttcctatgcggacatcgtgcgtgaacgtgccgttgtccgtgagatgatctcggttgcgaatgagattgccgaagctggttttgatccgcaggggcgtaccagcgaagatctgctggatctggctgaatcccgcgtctntaaaattgccgaaagtcgtgcgaacaaagacgaagggccgaagaacatcgccgatgtgctcgacgcaaccgtggcgcgtattgagcagttatttcagcagccacacgatggcgttaccggggtaaacaccggttatgatgatctcaacaaaaaaaccgctggcttgcagccgtcggatttgatcatcgtcgccgcgcgtccgtcgatgggtaaaacaacatttgcgatgaacctcgtcgaaaacgcggcgatgttgcaggataaaccggtacttattttctcgctggagatgccatcagaacagatcatgatgcgttctctggcgtcgctgtcgcgcgttgaccagactaaaatccgtaccgggcagctcgatgatgaagactgggcncgcatttccggcaccatgggtattttgctcgaaaaacgcaatatctatatcgatgactcctccggcctgacgccaacggaagtgcgttcccgcgcacgccgtattgcccgtgaacacggcggcatcgggcttatcatgatcgactacctgcaactgatgcgcgtaccggcactttccgataaccgtacgctggaaattgcagaaatctcccgctcgctgaaagcactggcgaaagaactgaacgtgccggtggtggcgctgtcccagttgaaccgttctctggaacaacgtgccgacaaacgtccggtcaactccgacctgcgtgaatctggctctatcgagcaggatgcggacttgatcatgtttatctatcgtgatgaggtgtatcacgaaaacagtgatttaaaaggcatcgcggaaattattatcggtaaacaacgtaacggcccaatcgggacggtacgcctgacctttaacggtcaatggtcgcgcttcgacaactatgcggggccgcagtacgacgacgaataataattattttatgaattaggtaattaaagcaaacacttatcaaggaacacaaatgcaagcggcaactgttgtgattaaccgccgcgctctgcgacacaacctgcaacgtcttcgtgaactggcacctgccagtaaaatggttgcggtggtgaaagcgaacgcttatggtcacggtcttcttgagaccgcgcgaacgctccccgatgctgacgcctttggcgtagcccgtctcgaagaagctctgcgactgcgtgcggggggaatcaccaaacctgtactgttactcgaaggcttttttgatgccagagatctgccgacgatttctgcgcaacattttcataccgccgtgcataacgaagaacagctggctgcgctggaagaggctagcctggacgagccggttaccgtctggatgaaactcgataccggtatgcaccgtctgggcgtaaggccggaacaggctgaggcgttttatcatcgcctgacccagtgcaaaaacgttcggcagccggtgaatatcgtcagccattttgcgcgcgcggatgaaccaaaatgtggcgcaaccgagaaacaactcgctatctttaataccttttgcgaaggcaaaccaggtcaacgttccattgccgcgtcgggtggcattctgctgtggccacagtcgcattttgactgggtgcgcccgggcatcattctttatggcgtctcgccgctggaagatcgctccaccggtgccgattttggctgtcagccagtgatgtcactaacctccagcctgattgccgtgcgtgagcataaagtcggagagcctgtcggttatggtggaacctggataagcgaacgtgatactcgtcttggtgtagttgcgatgggctatggcgatggttatccgcgcgccgcgccgtccggtacgccagtgctggtgaacggtcgcgaagtgccgattgtcgggcgcgtggcgatggatatgatctgcgtagacttaggtccacaggcacaggataaagccggggacccggtcattttgtggggtgaaggtttgcccgtagaacgtatcgctgaaatgacgaaagtaagcgcttacgaacttattacgcgcctgacttcaagggtcgcgatgaaatacgtggattaatcgttctgtaatatttgattgtctgtgccggatgcggcgtgaatgccttatccggccaataaaatcctaccaattcaataagttgatattctttcatgctcttataaaggtcgtgcctctggcggatgtacgtttgtcatgagtctcactctgttgctaattgccgttcgcccctgaacatccactcgatcttcgccttcttccggtttattgtgttttaaccacctgcccgtaaacctggagaaccatcgcgtgtttcaaaaagttgacgcctacgctggcgacccgattcttacgcttatggagcgttttaaagaagaccctcgcagcgacaaagtgaatttaagtatcggtctgtactacaacgaagacggaattattccacaattgaaagccgtggcggaggcggaagcgcgcctgaatgcggtgcctcatggcgcttcgctttatttaccgatggaagggcttaacagctatcgccatgccattgcgccgctgctgtttggtgccgaccatccggtactgcaacaacagcgcgtagcaaccattcaaacccttggcggctcaggggcattgaaagtgggcgcggatttcctgaaacgctacttcccggaatcaggcgtctgggtcagcgatcctacctgggaaaaccacgtagcaatattcgccggggctggattcgaagtaagcacttacccctggtatgacgaagcgactaacggcgtgcgctttaatgacctgttggcgatgctgaaaacattacctgcccgcagtattgtgttgctgcatccatgttgccacaacccaacgggtgccgatctcactaatgaccagtgggatgcggtgattgaaattctcaaagcccgcgagcttatcccattccttgatattgcctatcaaggatttggtgccggtatggaagaggatgcctacgccattcgcgccattgccagcgctggattacccgctctggtgagcaattcgttctcgaaaattttctccctttacggcgagcgcgtcggcggactttctgttctgtgtgaagatgccgaagctgcaggccgcgtactggggcaattgaaagcaacagttcgccgcaactactccagcccgccgaattttggtgcgcaggtggtggctgcagtgctgaatgacgaggcattgaaagccagctggctggcggaagtagaagatatgcgtactcgcattctggcaatgcgtcaggaactggtgaaggtattaagcacagagatgccagaacgcaatttcgattatctgcttaatcagcgcggcatgttcagttataccggtttaagtgccgctcaggttgaccgactacgtgaagaatttggtgtctatctcatcgccagcggtcgcatgtgtgtcgccgggttaaatacngcaaatgtgcaacgtgtggcaaaggcgtttgctgcggtgatgtaatgcaggaaagcaggctggaattacccagcctgcagtgaaattaaactgtcgtcgctttcactctttctttatagatgatttttttgataccatcgttctacgtgagagataataaacgttgttagttcttttattgttaagtttatcccaattatctggaattcctttccctgtttttttcgtgtggagtaataatttctgcacatctaaccattattaaannnnntaataagtatcgggtttgttacgatagaatttttctatatcctcaagaatatgctttgccttattgcctgtgactttctgacattcaatttcagtatcattaaattctaaagttaaagagaactcctttgtgtaagtttaaccttatattgattactaatatcaaatgaaaaggtcctgtaatgagaataatcatctttaacctcctcggcaaaacagcaaagcgtgcaaatatacatacaatctttcttacccctgattttgttaactaaatcaataaaagcgtgaaaaactgtacttgcaatagaacttgatacttcttcttcaggtctacaaaaatcttttgcaatttttaactgtgtttctatatataaaaagaaatctttggcataagaaaaatctttgttattttgtacatctaactcaataggtaaagatgtcgttttgttgctattcacatatgatatattcatataatcatctccttcgggagtaataaaattaatcaccattgtagggtagggttctggtcaatcagaaatcatctttataaacttcgattgtttttgtaatgctgtatcattaagttcattaaatcgtacagcagataaatgttctatcaaatttcgctcatttgcagagtattcatcataataaacgtaaaattaatgtatccttacatcgagcattaaccattttttacaaaaaaacgacaggaacgtatttactaggttaaatataatcatcctgcttttcatcacaaaaaccgcagataatccttcctttcccctgtagctggcgttatggtcagatagtttttgcaacaaatctcacaataaaaagtttcaacatactgactatttagggaaaaatatgcgcaagatcacacaggcaatcagtgccgtttgcttattgttcgctctaaacagttccgctgttgccctggcctcatctccttcaccgcttaaccctgggactaacgttgccaggcttgctgaacaggcaccaattcattgggtttcggtcgcacaaattgaaaatagcctcgcagggcgtccgccaatggcggtggggtttgatatcgatgacacggtacttttttccagtccgggcttctggcgcggcaaaaaaaacttctcgccagaaagcgaagattatctgaaaaaccctgtattctgggaaaaaatgaacaacggctgggatgaattcagcattccaaaagaggtcgctcgccagctgattgatatgcatgtacgccgtggtgacgcgatcttctttgtgactggtcgtagcccgacgaaaacagaaacggtttcaaaaacgctggcggataattttcatattcctgccaccagcatgaatccggtgatctttgcgggcgataaaccagggcaaaatacaaaatcgcaatggctgcaggataaaaatatccgaattttttatggcgattccgataacgatattaccgccgcacgcgatgtcggcgctcgtggtatccgcattctgcgtgcctccaactctacctacaaacccttgccacaagcgggtgcgtttggtgaagaggtgatcgtcaattcagaatactgacagagcgggagagcgtgacactctcccgaatgctgtttttttaatcacacctttatactttcgctgtcttgctgcaaactgattaagagagttttatcaaggagcagcacatgtggtatcaaaagacgctcacgcttagcgccaaatctcgtgggtttcatctggtaacggatgaaattctgaatcagctggctgatatgccgcgcgttaacatcggcttactgcatctgttgctgcaacatacntccgcctctctgacacttaatgagaactgtgatcccaccgtacgccacgacatggagcgttttttcctccgcaccgttcccgacaacggaaattatgagcatgactatgagggagcagacgatatgccttctcatatcaaatcctcaatgctgggaacatcgcttgtattgccggtgcataaagggcgtattcagaccggcacctggcaaggcatttggctgggggaacatcgcatccacggcggatcgcgtcgcatcatcgcgacactacaaggggagtaaaaaatgaccatttcggagttgctacaatattgcatggcaaaaccaggcgcagaacagagcgtgcataacgactggaaagcgacgcagatcaaagtggaagatgtactgtttgcgatggtgaaagaagtagaaaatcgcccagctgtttcgctgaaaaccagcccggagctggcggagctgctacgtcagcagcacagcgatgtgcgtccaagccgccatctgaataaagcgcactggagcaccgtgtatctcgacggttcgctgccggattcgcaaatctattatctggtggatgcgtcttatcagcaggcggtgaatttactgccggaagaaaaacgtaaattgctggtgcaactctgaaaggaaaaggccgctcggaaggcggccttaacgattacagcatcggcttgaggaagcgtgccgtatgcgaagcttcgcactccgcgacggtttctggcgtaccggagacgaggatctcgccgccgccactgccgccttccggccccaggtcgacaatccagtcagcggttttaatcacgtcgagattgtgctcaatcaccacaatggtgttgccctgatcgcgcagtttatgcagtacgtcgagcagttgctgaatatcggcgaagtgcagaccggtggtcggctcgtcgagaatatacagcgtctgcccggtgccgcgttttgacagctcacgcgccagcttcacgcgctgggcttcaccaccagaaagtgtggttgcggactgccccaagcgaatgtacgtcagaccaacgtccatcaacgtttgcagcttacgcgccagagctggcaccgcatcaaagaactcacgcgcctcttcgatggtcatatccagcacttcgtggatggttttgcctttgtacttaatctccagcgtttcacggttatagcgtttacctttgcactggtcgcacggcacgtaaatgtccggcaggaagtgcatctccactttgatcacgccatcgccctgacaggcctcgcagcgtccgccacggacgttaaagctgaaacgtcctggcgtataaccacgcgcacgggattccggtacgcccgcaaacagttcgcgcacaggcgtaaacacgccggtataggtcgccgggttagaacgcggagtacgaccaattgggctttggtcgatatcgattactttgtcgaaatgctccagtccctgaatatcgcgatacggtgccggttcggcgatggtcgcaccattcaactggcgttgggcaatcgggaacagtgtgtcgttaatcagcgtcgatttaccggaacctgaaacccctgtgatgcaggtaaacagaccgactggcagcgttagcgtcacgtctttcaggttgttgccgcgtgcgccagtcagcttaagtactttttccggattcgccggaacgcgtttcttcggcacttcaatcttgcgtttaccgctcatgtactgtccggtcaacgactccggcaccgccataatcgcttccagcggaccttccgcgaccacttcaccgccatgtacacctgcaccaggaccgatatcgatcacatgatcagcggcgcgaatcgcgtcttcgtcgtgctccaccacaatcacggtattaccgagatcgcgcagatggataagcgtacccaacaggcgctcgttatcgcgctggtgcaggccgatagacggctcatccagcacgtacataacgccaaccaggcccgcaccaatctggctcgccagacggatacgctgggcttcaccgccggaaagcgtttctgccgagcgggaaagcgtcaggtaattcaggccgacgttaacgaggaatttcaaacgatcgccgatctctttaagaattttttccgcaatcttcgcccgctgacctgcgagtttgagattgttgaagaattccatcgcatgaccaatgctcatgtcggagatggcgggcagcggcgtattctcgacatacacgtggcgcgcttcccgacgcagacgcgtcccttcgcagctggcgcacgggcgattgctgatgaacttggctaattcttcacgtaccgcactggattctgtctctttataacggcgctccatattgtgcagcacgcnttcgaacggatgacgacggatggaggtatcgccacgatcgttcatgtatttgaattcaatgttttctttgccagaaccgtacaacaccactttatgcacgttcgcgctcaggctgccccacggcgcttcgacgtcgaacttatagtgatctgccagcgatttcagcatctggaaataatagaagttgcggcgatcccagccacggatcgcaccacctgccagcgacagttccggattctggatcacgcggtcaggatcgaaatattgctgtacgccaaggccgtcgcaggtcgggcaggcacctgccgggttgttaaacgaaaacagtcgcggctccagttcacgcatactgtagccgcaaattgggcaggcgaagttggcggaaaacagcagctcttccgctttcgggtcgtccatatccgccactaccgcggtaccaccggaaagctccagcgcggtttcaaacgactcggcaagacgttgggtaagatcgtcacgcaccttgaagcgatcaaccaccacttcaatagtgtgtttcttttgcagttccagtttcggcggatcggaaagatcgcagacttcgccatcaatacgagcacggatgtaaccctggcttgccaggttctccagcgttttggtgtgttcgcctttgcgctctttaatgattggcgcgagcagcatcagacgcttgccttccggctgcgacagcacgttatccaccatctggctgacggtttgcgnnnncagcgggacgtcgtggtccggacagcgcggttcgccgacgcgggcgtacaacaaacgcaaatagtcgtggatttcggtgattgtccccaccgtagaacgcgggttatgagacgtcgatttctgctcaattgagatggcaggagaaagcccctcaatatgatcgacgtccggcttttccatcagtgacagaaactgccgcgcgtangcggaaagggattcaacgtaacggcgctgcccttcggcatataaggtgtcgaaagcgagcgaggatttgccagaacccgaaagcccggtcacgacaatgagcttgtcgcgggggataacgaggttgatgtttttgagattatgggtgcgggcgccccgaacttcgatcttatccattcacctttcccggattaaacgcttttttgcccggtggcatggtgctaccggcgatcacaaacggttaattatgacacaaattgacctgaatgaatatacagtattggaatgcattacccggagtgttgtgtaacaatgtctggccaggtttgtttcccggaaccgaggtcacaacatagtaaaagcgctattggtaatggtacaatcgcgcgtttacacttattcagaacgattttttttcaggagacacgaacatggccagcagaggcgtaaacaaggttattctcgttggtaatctgggtcaggacccggaagtacgctacatgccaaatggtggcgcagttgccaacattacgctggctacttccgaatcctggcgtgataaagcgaccggcgagatgaaagagcagactgaatggcaccgcgttgtgctgttcggcaaactggcagaagtggccagcgaatatctgcgtaaaggttctcaggtttatatcgaaggtcagctgcgtacccgtaaatggaccgatcaatccggtcaggatcgctacaccacagaagtcgtggtgaacgttggcggcaccatgcanatgctgggtggtcgtcagggtggtggcgctcctgcaggtggcaatatcggtggtggtcagccgcagggcggttggggtcagcctcagcagccgcagggtggcaatcagttcagcggcggcgcgcagtctcgcccgcagcagtccgctccggcagcgccgtctaacgagccgccgatggactttgatgacgatattccgttctgatttgtcattaaaacaataggttatattgttttaaggtggatgattaaagcatctgccagccataaaaaagaagcctccgttatggaggcttctacgtatcaggtcaaaatcattggccactgtggcggtgtctgattcatctcttctatcatcaccgactcgatgttgtgccagatggcggtgatgtccgccattgtgatgccaagcaaccccattgcgaaccagcaggcggaaaccacgcccagaccgctgctgatcactgcaagcccgacataatcagaccgacgaaaacggatgttgagcgtgctggccagaaacatcattacggcactaagaagttgccagcgaagaagaaccacgccagtggtgagggtagccatcaaacaattcctctgaaaagagccgatgccctggacagcgcggcgttgttcacgggaggcgtggtacactctggctatcgcggggcttgcagaacacaaaaatgaaacactctgtttgtttcattaattttgtgaactntatcacaattgattgtttgttagccagattaggtcgtgacttttattgctgtacagattatgtggtttttcagtggcattaagggtatatcttcccgccgcctctgtannnnnnnnnnnnntnaattttgaatatcaatgaattattttcatccaagtgacgattaaaaaggtatcaatttcaaatcaggcaaaagtgctatttataccgtaagatttatctaaagacgtcggtagccagggtttcaccttgcaatggccgggtataaacaggcaggaaattgatagcaatgaatcatcgtgcacgacaccaattactggcgttgccgggcattatctttttagttctctttcccatcattctttcgctatggattgccttcctttgggcaaaatcagaagtgaataatcagctccgaacctttgctcaactggcgttggataaatccgagctggtcattcgccaggcagatttagtgagcgatacagttgaacgctatcaggggcaagtttgcactccagcccatcaaaagcgaatgttgaatattattcgtggctatctttatattaatgaattgatctatgcccgtgataatcattttttatgctcatcgctgatagtgcctgtaaacggctatacgattgtatcggccgattataagcgtgaacctaatgtttctatctattattaccgcgatacgccttttttctctggctataaaatgacctatatgcagcggggaaattatgtggcggttatcaaccctctcttctggagtgaagtgatgtctgatgacccgacattgcaatggggtgtgtatgatacggtgacgaaaacctttttctcgttaagcaaagaggcctcagcagcaacgttttctccgctgattcatttgaaggatttaaccgtacaaagaaatggctatttatatgcgacagtttattcgacaaaacgcccaattgcagccattgttgcgacttcatatcaacgtcttatagcccatttttataatcatcttatttttgcgttgcccgccggtattttggggagtcttgttctgctattactctggctacgtattcgacaaaactatttgtctcccaaacgcaaattgcaacgcgccctcgaaaaacatcagctatgcctttattaccagccaataattgatatcaaaacaganaaatgtatcggcgctgaagcgttgttacgttggcctggtgagcaggggcaagtaatgaatccggcagagtttattccgctggcagaaaaggaggggatgatagaacaggtaactgattatgttattgataatgtcttccgcgatctgggcgcgtaccttgcaacacatgctgatcgctatgtttctattaatctgtcggcctccgattttcatacgtcacggttgatagcgcgaatcaatcagaaaacagagcaatacgcggtgcgtccgcagcaannnaaatttgaagtgactgagcatgcatttcttgatgtcgacaaaatgacgccgattattctggctttccgccaggctggttacgaagtggcaattgatgattttggtattggctactctaacttgcataaccttaaatcattgaatgtcgatattttgaaaatcgacaaatcgtttgttgaaacgctgaccacccataaaaccagtcatttgattgctgaacatatcatcgagctggcgcacagcctggggttaaaaacgatcgctgaaggcgtcgaaactgaggagcaggttaactggctgcgcaaacgcggcgtgcgctattgccagggatggttctttgcgaaggcgatgccgccgcaggtgtttatgcaatggatggagcaattacccgcgcgggagttaacgcgcgggcaataaaactacaggcggtggcgataatcgctgggagtgcgatcaaactgccgacggaaaacgcgggagaaggtctgctgagagacataacccaggtccattgcgatatcaaaaatcggacgctcggtggtgcgcaactcaacggcggccagtaacagacggcgttgacgaatgtaatcgccaagcgtctgatgcgtcaccgtgcggaacatccgttgcaggtaccactttgaatagcctgatttttttgcgacgacatcaatgttaagcggctggtcaatatgctcgtcaatccatgcgataagatcctgaataattttctgatgggacataaatctgcctcttttcagtgttcagttcgttaattcatctgttggggagtataattcctcaagttaacttgaggtaaagcgatttatggaaaagaaattaccccgcattaaagcgctgctaacccccggcgaagtggcgaaacgcagcggtgtggcggtatcggcgctgcatttctatgaaagcaaagggttgattaccagtatccgtaacagcggcaatcagcggcgttataaacgtgatgtgttgcgatatgtcgcaattatcaaaattgctcagcgtattggcattcctctcgcgaccattggtgaagcgtttggcgtgttgcccgaagggcatacgttaagtgcgaaagagtggaaacagctttcgtcccaatggcgagaagagttggatcggcgcattcataccttagtggcgctgcgtgacgaactggacggatgtattggttgtggctgcctttcgcgcagtgattgcccgttgcgtaacccgggcgaccgcttaggagaagaaggtaccggcgcacgcttgctggaagatgaacaaaactaaagcgccacaagggcgctttagtttgttttccggtctttgtctttctctctatcccgctggtacacaggagggtttcccccgacgtcaacacacctcattcgagcacgtggtggaggttccggttggtgttgatgctttaattgtatgtcaccgacgtttcttcgccagtgtaaaagtatactttttagccgcaatatttttgtcatctcagacgattttttatcgcaatcctcaacggtatacggctcgataacgctgcaatcttgcgcatcgacgataacgtttgcgcatcaattgcctggtttttcatcgtcaagacaataaaagagaaaaaagcagcaaacttcggttgaaaaagccgctatgatcgccggataatcgtttgctttttttaccacccgttttgtatgcgcggagctaaacgtttgcttttttgcgacgcagcaaattgtcgcaaacctggagcaggaagataacgtttcgctggcaggggattgtccgccacgcatcttgacgaaaattaaactctcaggggatgttctcttatgtctacgccatcagcgcgtaccggcggttcactcgacgcctggtttaaaatttcacaacgtggaagcactgtccgtcaggaagtggttgccgggttaacaacgtttctggcgatggtctactcggttatcgtcgttccaggcatgttgggtaaagcgggcttcccgcctgcggcagttttcgttgcgacctgtctggttgccggactcggttctatcgtgatgggtctgtgggctaatctgccgttggcgattggttgcgccatctccctgacggcgtttaccgcattcagcctggtgctggggcaacatattagcgtacctgtcgcgctgggtgccgtgttcctgatgggtgtgctgtttacggtaatttctgccacgggtatccgtagctggattttgcgcaacttgccgcacggtgtggcgcacggcacggggatcggtatcggtctgttcctgctgctcattgccgctaacggtgtcggtctggtgattaaaaacccgcttgatggtctgcccgttgcgctgggtgatttcgcgaccttcccggtgattatgtcactggtaggtctggcggtgatcatcggcctggaaaaactgaaagtccctggtggcattctgctgaccattatcggtatctcaattgtcggtttgatcttcgatcctaacgtccatttctccggcattttcgccatgccttcattgagcgatgaaaacggcaattcactgattggcagcctggacattatgggcgcgctgaatcctgtagtcctgccaagcgttctggcgctggtgatgacggcagtatttgatgccaccggaactatccgcgctgtcgccggccaggcgaacctgctggataaagatgggcagatcatcgacggcgggaaagcactgaccactgactccatgagcagcgttttctctggcctggtgggtgcagctccggcagcggtatacatcgagtctgcggcgggtacggcggcgggcggtaaaaccggtttgacggctatcaccgttggcgtgctgttcctgctgattctgttcctctctccgctttcttacctcgttccggggtatgcaacggctccggcgctgatgtacgttggcctgctgatgctgagcaacgtggcgaaaatcgactttgctgattttgttgatgcgatggcgggtctggttacggcggtattcatcgtgctgacctgtaacatcgtaacaggcatcatgatcggcttcgcgactctggtgattggtcgtctggtttccggtgaatggcgcaagttgaacatcggtacggtcgttatcgccgtggcgctggtgaccttctatgcgggtggctgggctatctaatctttcatcggattctgaaaacgggtggcaatggctgcccgtttttattttctccgcacattgtgtgagcttttgcgatattctgaaaaaatgagaattcaggcataacgtctttctcagatcataaaaaacatcgcaaacagggaacgcatggaaatcttcttcaccatactgataatgaccntcgtggtctcgctgtccggggtggtcactcgtgtcatgccctttcagatcccgcttccgcttatgcaaatcgccatcggtgcgctactggcgtggccgacgtttggtttgcatgtggagtttgatcctgaactctttttagtcttgtttatcccgccgttgctgttcgctgatggctggaaaacgccgacccgtgaatttctcgaacatggtcgagagattttcggcctcgcgctggcgctggtggtggtcaccgtggtcggcattggcttccttatttactgggtggtgccgggcattccgctgatccccgcctttgcgctggcggcggtgctttctccgaccgatgctgtggcgctctccgggattgttggcgaagggcgcatcccgaaaaaaatcatgggcattttgcagggcgaagcgttgatgaatgacgcctccggcctggtgtcgttgaagtttgccgtggcagtggcgatggggacgatgatcttcaccgtcggcggtgcgacggtcgaatttatgaaagtagccattggcggtattctcgccggttttgtggtgagctggctgtacggtcgctcgctgcgattcctcagccgctggggcggtgatgaacccgcgacgcagatcgtcctgctgttcctgctgccattcgcttcttatctgattgccgaacatattggcgtttccggcatcctcgctgcggttgccgccgggatgaccatcacccgctccggtgtgatgcgccgtgcgccgctggcaatgcgcctgcgtgcaaacagcacctgggcgatgctggaatttgtctttaacggcatggtgttcctgctgttaggtctgcagctgccgggtattctggagacgtcgctgatggcagcagaaatcgaccctaacgtcgaaatctggatgctgtttaccgatattattctgatatatgcggcgctgatgctggtccgtttcggctggctgtggacgatgaaaaagttcagcaaccgcttcctgaagaagaagccgatggagtttggttcgtggaccacacgagaaatcctgatcgcgtctttcgccggggtgcgtggggcgatcactttggccggtgtgctctctatcccgctgctcttgccggatggtaacgtcttcccggcgcgctatgagctggtgtttctggcggctggtgtcattctcttctcgctgtttgtcggcgtggtgatgttgcctattctgctacaacacattgaagtcgcggaccattcgcaacaattgaaagaagaacgtattgcgcgagcggcaacggcagaagtggcgattgtggcgatccagaaaatggaggagcgtctggcggcggataccgaagagaatatcgataaccagctgattacggaggtcagttctcgcgtcattggtaacctgcgtcgtcgcgccgatggacgtaacgacgttgaaagttccgtgcaggaagagaaccttgagcgtcgcttccgtctggcggcattgcgttctgaacgtgctgaactgtaccacctgcgcgccacgcgggagatcagcaacgaaacgctgcaaaaattactgcacgatctcgatttgcttgaagcgttgctaattgaggaaaatcagtaagccgaaagcgacgtaaccaggcccgaggtaatctgaaaaaggtgcaatcttttgcacctttaacaggttagctcgggctaacattcatgattctaaaacaaataagttatctctcttttaaagtcatttcattggctgttcttcgacttaatctcaatctgcgtgttgcataatatctgcagtaatcttcatagctacttcatgagtattattctcagtttgtgacatgccagtatgagaggtacaatcttcttcaaagaatttctgtagtgttaccagggtatcactattaatgggaatattctcctccccacggagaatggaaatgcccattccctggacgctagcctcatcgaaattaacccgatagagacgggtattaaacatccaggcttttgttaaaacagaacagttgaaatggcaattgtttaaattggcattattaaaattaacattagccatattagaatcggtgcatataaccatttcgaggaacgtatttgttagccgtgtaaaaaagagtttactatcaattaagtttatattctggaggattgctttgttcagattgacgcgagacagatcagcatgttcaaagttaattaaatcaagtttagagaagctaaggtcggctctaaataaattaatatatggcgctattactttataaagatttacctcagccatgtatgccatataaaaatttgaataatcaaggaaggtatttttaatattggctctattcattgttgcattgtagaattgaacatgcatagcggagcatgaatttagagttccgtcagtcatttttatctgagcgaaatatgagtcatcgagaatacaattatcaaaaagtattttttccattatggcgaaattaaaattcgttttatacatattacagtcctggaaaatagcgttttgtagtctgcaacctgcaaaattcgaattggataaatcttcatctttaatcacgatacctttcaggctaaggtgtgaaaaatcgtaaccaccatttactgtctgtgggatttcgatagtattattatggacggtgacattatttataaaatataccaccttaattgacacttccttatctttattaaggtaaactcttctcgtaattctatcgtcacatttattatttgcatgtgaagctatatctataaaatatttatgtattttcctgtccgtttctttcgtgatttttcctgatggtaaactatcataaattcttttcattttctgaatcaagtctatcactttttcatgatcatccattttgaaaagagagagggctttattgtcaattaacgtgtttttatgatgtttgctgtaattatctgattttgttttctttgtatgtgatggacttgtgacagagtggttatcgttaatcaggcaaagagggaaaaacatattatttaaaccattatagcgcataaagtatccttataattaacaagaaagaaaaggcatattctctgcattatcattttctacgactgtcaaaaatcgctcatttttttttaatgagtttatttgtttaatattatgggaaaaggtgatgcatttgggagaggaagagtattccccggtcagacgaccggggaaggggagagattaatgcgcgcggccttgctcaacgccaaagccggtctgggagcggataaactgcgcgcggaacagttcacgctcacgcgcgccttccgctgagttatcggttgccgagaagaaccagatgccgaggaatgccacggtgatagagaacagcgccggtattcatacgggaagatggctttttcgtgaccgaggatctgtacccaaatcgtcgggccgaggatcatcagtaccactgcggtaatcagccccagccagccacccatcatcgcgccacgcgtggtcagtttcgaccagtacatagaaagcagaatgatcgggaagttacagctcgccgcgatggcaaacgccagccccaccataaaggcgatgttctgattctcaaacagcacgccgaggataatcgcaatcacacccaaaatcaggacggtgattttcgatacccgcagctcttcacgttcggtcgcgccttttttgaagacgttagcgtacaggtcatgcgaaaccgctgatgcgcccgccagcgtcagacccgcaaccaccgcgaggatagtggcgaaagcaaccgctgaaataaagccgaggaacaggttgccgcccaccgcattggccaggtgaactgctgccatgttgttaccaccaatcagatggcccgccgcgtctttatattccggattcgcaccgaccagcatgatcgcgccgaagccgataataaaggtcaggatatagaagtagcccataaatccggtagcgtagaacacgctcttacgcgcttcgcgggcatcgctgaccgtaaagaagcgcatcagaatgtgcggcaagccagccgtaccaaacatcagtcctagccccagagagagtgcggagatcggatctttcaccagtccgcccggtttcatgatgtcgacacctttcgggtgtaccgccatcgcttcgctgaacagattgttgaagctaaagccgacgtgtttcatcaccataaaggccataaagctggcaccgaacagcaacagcacagctttgataatctgtacccaggtggtcgccagcatgccgccgaacaggacgtacatcatcatcagcacgccgaccagcaccactgcaatgtgatagttaaggccaaacagcagctcgatcagtttacctgcgcccaccatctgggcgataaggtaaagcgccaccaccaccagagaaccacaggccgaaagaatacgaatcggcccttgtttcagacgataagaggctacatcggcaaaggtgtaacgccccaggttacgcagacgttcggcaatcaggaacaaaatgatcggccagcccaccaggaagcccagcgagtaaattaagccgtcatagccggaggtaaacaccagtgcggagatccccaaaaatgaggcggcggacatatagtcaccggcaatcgccagcccgttctgaaaaccggtgatattgccgcctgcggtgtaatagtcattacgcgaacgtacgcgttttgacgcccagtaggtaatgccgagcgtaaacacgacgaaaatcaggaacataataatcgcctgccagttcgttggctggcgctctacggccccgctaatagcatccgnggcgttagctgcgaaagggagngtggcggcaagcgccgtcagaactcttttcatgatgcttgtacctcatgcaggacttcattattaagacggtcgaattcgccgttcgcccgccagatgtagataccagtgagaacaaaggagatcactattaccccaacaccgactggaataccgcgtgtgacgctggtgttcggattcagcggggtgcccagccagccgggcgcgaaggcgatcagtaaaataaagccgatataaactgccagcataataatcgacaggatggtggcaaaccgttgccgtttttcgactaactccctgaaatgcgcattgtcttctatccgctgataaatagtgccattcatcacagattctccagaggtaatgtagggattgttttaattcccgctcccttatgggagaaggttaacgctcgggtaacccttgccgaatgtaggccggataaggcgttatacgccgcatccggcaatcaatgcctgatgcgacgctgtcgcgtcttatcaggcctacaaaccgttaccgactcgcatccggcaattgtgggttacgatggcatcgcgatagcctgcttctcttcaagcagcttctcgactacgccaggatcggcaagcgtcgaggtatcgcccaggttgctggtatcgcccgccgcaattttgcgcagaatanggcgcataattttgccggagcgggttttaggcagggagtcggtccagtgcagcacgtctggcgtcgccagcgggccaatctctttacgcacccagttgcggacttctgcgtacagttctggtgacggttcctccccgtgattaagcgtgacgtaggcgtagatcgcctgacctttaatattgtgcggaataccgacgacagcggcttcggcgattttcggatgcgccaccagcgccgactcaatctccgccgttcccagacggtgaccggagacgttcagcacatcgtccacacgcccggtgatccagtaatagctatcttcatcacgacgcgcgccgtcgccgctgaaatacatatttttgaaggtggaaaaataggtctgctcaaaacgttcgtgatcgccaaacagcgtacgcgcctgacccggccaggagnnnntgatcaccaggctaccttcggtagccccttccagcgggttaccttcgttatcgaccagcgccggttgcacgccgaagaacggacgtgttgccgaaccggctttcagctcggtagcgccaggcagcggggtgatcatgaaaccgccggtttcggtctgccaccaggtatcgaccaccggacatttctcgttgccgatttttttccagtaccactcccacgcttccgggttaattggctcgcccacggaaccgagaatgcgcagcgacgaacggtcggtgccttcgatcgctttatcgccttccgccatcagcgcgcgaatcgccgtgggcgcggtatagagaatattgacctgatgcttgtccaccacctgtgccatacgggcaggcgtcggccagttcggtacgccttcaaacatcagcgtggtcgcgccgcaggccagcgggccgtacagcaaataactgtgtccggtcacccagcccacatcggcggtgcaccagtagatatcgcccggatgataatcaaagacatatttaaaggtcagcgccgcgtacaccagataaccgccggtagtgtgcagtacgccttttggttttccggtagaaccggaggtatagagaataaacagcggatcttcggcgttcatctcttccgcctggtgctgatcgctggcttgctcaacctggtcgtgccaccacaggtcgcgcccttcctgccagtcaattttcccgccagtacgcttcagtaccaccacatgctctacgctggtgacgttcgggttttttagtgcgtcatcaacgtttttcttcagcggaatactacgcccggcgcgcacgccttcgtcggaagtgatcaccagtcgtgagttggaatcgataatgcgcccggcaaccgcttccggcgagaagccaccgaaaattaccgaatgcaccgcgccaatacgggcgcaggccagcatcgcaaccgcggcttccggcaccatcggcatataaatcgccaccacatcaccttttttaatgcccagcttgagcagggtattggcgaagcggcagacgtcgcggtgcagctctttatagctgatatgtttgctctggctggcgtcgtcgccttcccagatgatggcggtacgatcgccgttttcttgcagatggcggtcaaggcagtttgccgccagattcagcgtgccgtcctcgtaccatttaatggacacattaccgggggcaaaggagatgtttttcaccttctggtacggtttgatccagtcgagaatttttccctgttcgccccagaaggtatcaggtgcgttaatagattgttgatacatcgcctcgtactgctgagggtttatcaggcaacggtctgcgatgttggcaggaatggtgtgtttgtgaatttgactcatgcttttgttctccttgtaggatgttaataatatgtggcataagcgttaaatgtaggggtattggcagttttgtttagtatttgggcgacagatcacgcaaaagtagaattgtgcaaataaacggcagggtaatttttgaaggtcagcaacaaaagttgattaattctttgaggaacatgcagttatgcatgctgttgaaaaagaggaagatactgactaactctaaagtggtattttacatgcacttacaattgattaaagacaacattcacagtgtggttatttgttacacataggggcgagcaatgtcatgacagtgtaggtgcggttactgtcgtgaaaaacaataaaaaccgccattgcaacaatggcgcaattcggatgaagcccctatgacaaggataaaaataaacgcacgccgtatcttcagcttattgattccttttttctttttcacttctgttcacgctgaacaaacggctgctcccgcaaaacctgtaactgtggaagcgaagaatgaaacctttgccccgcagcatcccgatcaatatctctcctggaaagccacctcggaacagtcagagcgtgttgacgccctggcggaagatccacggctggtgatcctgtgggcggggtatcccttctcgcgcgattacaacaagccgcgtggacatgcntttgctgtgaccgatgtgcgtgaaaccctgcgtaccggtgcgccgaaaaacgctgaagatggtccgctaccgatggcgtgctggagttgtaaaagcccggatgtggcgcgtctgatccagaaagacggcgaagatggctacttccacggtaaatgggcgcgcggcggcccggaaatcgtcaacaacttangttgtgccgattgccataacaccgcctctccagagttcgccaaaggcaaaccggagttaaccctttcccgtccgtatgcggctcgcgcgatggaagccattggtaaaccttttgagaaagccggacgtttcgaccagcaatcgatggtttgcggtcagtgccatgtggagtattacttcgacggcaaaaacaaagcggttaaattcccgtgggatgacggcatgaaagtcgaaaatatggagcagtattacgacaaaattgccttctctgactggactaactccctgtcgaaaacgccaatgctgaaagcgcagcacccggaatatgaaacctggacagcgggcattcacggtaaaaacaacgtgacctgtatcgactgccatatgccaaaagtgcagaacgccgaaggcaaactctacaccgaccataaaattggtaatccgtttgataacttcgcccagacttgtgcgaactgccatacccaggacaaagctgccttgcaaaaagtgntcgcggaacgtaagcagtcgattaacgacctgaaaatcaaggttgaagatcaactggttcacgctcacttcgaagcgaaagcggcgctggacgcaggtgcgacggaagccgaaatgaagccgattcaggacgatatccgtcatgcccagtggcgttgggatctggcgatcgcttcccacggcattcatatgcacgcaccggaagaaggtctgaggatgctcggtacggcgatggataaagcggcggatgcacgcaccaaactggcgcgcctgctggcgactaaaggcatcacccatgaaatccagatcccggatatctcgaccaaagagaaagcccagcaggccattggcctgaacatggaacaaatcaaggccgagaagcagganttcatcaaaacggtgatcccgcagtgggaagagcaggcacgtaaaaacggtctgttaagccaataaccccgttccgcctcgcaaggggcggaaaacacaatggagtgaatatgagcgtattacgttcgttattaactgccggggtgctggcgtcgggcctgttgtggagcctgaacggaattaccgctacccctgcggcgcaggcatctgatgatcgctacgaagttacccagcagcgtaacccggatgccgcctgtctggactgtcataagccagataccgaaggtatgcatggcaaacatgcttccgttatcaacccgaataacaaactgccggtcacctgcaccaactgtcacggccagccatcaccgcaacaccgcgaaggggtgaaagatgtgatgcgctttaacgagccgatgtacaaggttggagagcagaacagcgtctgtatgtcctgccatctgccggaacagttgcaaaaagcgttctggccgcacgatgtccacgtaaccaaagtggcgtgcgccagctgccattccctgcatccacagcaagatacgatgcagacgttaagtgacaaaggacggattaagatttgcgtcgattgccacagcgatcagcgcaccaatccgaactttaacccggcgtctgttccgttgcttaaggagcagccatgacctggtctcgtcgccagtttctcaccggcgtcggcgtgctggcagccgtcagcggcaccgcagggcgcgtggtggcgaaaacgttgaatatcaatggggtgcgttacggcatggtgcatgacgagtcgttatgcatcggctgtaccgcctgtatggatgcttgtcgggaagtgaacaaggtgccggaaggcgtctcgcgcctgacgattattcgtagcgagccgcagggcgaatttcctgatgtgaaatatcgcttcttccgtaagtcttgccagcactgcgatcatgcgccgtgcgttgacgtctgcccgaccggtgcatcttttcgcgatgctgccagtgggattgtcgatgttaatccggatctctgcgtcggttgtcagtactgcatcgccgcctgtccgtaccgcgtgcgctttattcatccggtcacgaagacagcggacaaatgcgatttctgccgtaagaccaatttgcaggccggtaagcttcccgcgtgcgttgaggcttgcccgacgaaggcgctgacgtttggcaatctggacgatcccaacagtgagatttcgcaactgctgcgccagaagcccacttaccgctacaagctggcgctgggaaccaaaccgaagctgtaccgcgtaccgtttaaatacggggaggtgagccaatgacgcagacttccgcatttcattttgaatcgctggtgtgggactggccgattgccatctacctgtttttgattggtatttctgccggtctggtgacgctggccgtgctgttacgtcgcttctacccgcaggcgggcggtgcagacagcacgttgctgcgcaccacgctgattgtcggacttggcgcggtgatcctcggtctgttgatcctcgtcttccacctgacaagaccgtggaccttctggaagctgatgttccactacagttttacctcggtgatgtcgatgggggtgatgctgtttcagctttacatggtggtgctggtgctgtggctggcgaaaatctttgaacatgatttgcttgccctgcaacaacgctggttgccgaagctggggatcgtgcaaaaggttctgagtctgctgacgcccgttcatcgcggactggaaacattgatgctggtgctggcggtgttgttgggggcttataccggttttctgctgtcggcgctgaaatcgtatccgttccttaataacccgatcctgccggtgctgttcctcttctccggcatctcgtccggtgcggcggtggcactgatcgccatggcgatacgccaacgcagtaacccgcattccacggaagcgcagtttgtacaccgtatggaaatccccgtggtatggggtgaaatcttcctgctggcggcgtttttngtcggtctggcgctgggcgatgacggtaaagtgcgtgcgctggtggcggcattgggcggcggtttctggacgtggtggttctggcttggtgtcgccgggctggggctgattgtgccaatgttgttcaaaccgtgggtcaatcgcagttccggcattcctgccgtgctggcggcgtgtggggccagtctggtcggcgtgttgatgttgcgatttttcattctctacgccgggcagttaacggtggcgtaagccagaacagaggtggtttctggacgtattccttcctgaagtcggttttctggcgctgttgttaagtctcggggtcaacgtgttgaccccgttgacggcctttgcgggagtgcggttgcgctggcctgccatgatgcgactcacttgcatcggcattctggcacagttcgcgctcctgctgctcgcctttggcgtactgacgtattgttttctcatcagcgatttctcggtcatttatgtcgcccaacatagctacagcttgctgtcgtggaaactcaaactggcggcggtgtggggcggtcatgaaggttcgctgctgctttgggtgctgctgctttccgcctggagcgcgctgtttgcctggcaatatcggcagcaaaccgatccgctatttccgctgacgctagccgttttatctctcatgctcgccgcactgctactgtttgtagtgctgtggtccgatcccttcgtgcggatatttccaccagcaatcgaaggccgcgatctcaatccgatgctgcaacatcccggtcttatctttcatccaccgctgctttaccttggctatggcggtttgatggtagcggcgagcgtggcgctggcgagtctactgcgcggcgagtttgatggtgcctgcgcccgaatttgctggcgctgggcgttacctggctggagtgcattaactgcggggatcatcctcggttcctggtgggcctactgcgaactcggctggggcggctggtggttctgggatccggtggaaaacgcctctttattaccctggctttctgccactgcgctgctgcacagtttatccctgacacgccagcgggggatttttcgccactggtcgctgttgttggcgatagttactctgatgctgtcgctgctgggcaccttaattgtccgttctggcattctggtttcggttcatgcgttcgctctggataacgttcgcgctgtgccgttgttcagcctgtttgcactgattagccttgcgtctctggctctgtatggctggcgagcgcgggacggtggcccggcggtgcgtttttcggggttatcgcgggaaatgttaatcctcgctacgctgttgctgttttgcgcagtgctactgatcgtgctggtgggaacgctttatccgatgatttacggcctgctgggctggggacgcctctccgttggcgcaccgtattttaaccgcgcgacgttaccgtttggtctgttgatgttggtggtgattgtgctggcgacgtttgtctctggcaaacgcgcgcagcttccggcgctgctggcgcatgcgggcatactgttatttgccgcagggatcgttgtctccagcgtcagccgtcaggagatcagcctgaatttacagccgggtcagcaggtgacgctggcaggatacaccttccgttttgagcgcctcgatctgcaagccaaaggcaattacaccagcgaaaaagcgatagtggcgctgtttgaccatcagcaacgcattggtgaattaacgccggagcggcgtttttacnaagctcgtcgtcagcaaatgatggaaccgtcaattcgctggaacggcatccatgactggtatgcggtcatgggggagaaaactggagcggatcgttacgcttttcgcttgtatgtacaaagcggtgtgcgctggatctgggggggaggattgttgatgattgcgggcgcattgttaagcggatggcgggggaagaagcgcgatgtataaagggcttctcacgctactgctgttatttacctgttttgcgcgcgctcaggttgtagacacctggcaattcgccaatccgcaacaacagcaacaggcgttaaatattgccagccagttacgttgtccgcagtgccagaatcaaaacttactggaatccaacgcgccggtggcagtcagtatgcgccatcaggtttacagcatggtggcggaggggaaaagtgaagtcgaaatcattggctggatgaccgaacgctacggagattttgttcgctataacccaccgttaacgggtcagacgctggtgttgtgggcgctgccagtggtgttgttactgctgatggcactgatcctctggcgagtgagggcgaagcgatgaaacagcctcaaataccggtgaaaatgctgacaacactcacgatattgatggtattcctctgtatcggtagttatctgttaagcccaaaatggcaggcggtacgtgcggagtatcagcgtcagcgcgatccgctacatcagtttgccagccagcaaaacccggaagcgcagcttcaggcattgcaggataaaatccgcgctaatccacaaaacagcgaacagtgggcgttactgggcgagtactatctgtggcaaaacgattacagcaattcgctgctggcgtaccgtcaggcgttgcaactacgtggtgagaacgctgaactgtatgcggcgctggcgacggtgctttattaccaggccagccagcatatgaccgcccagactcgcgcaatgatcgacaaagccctcgcgctggactctaacgaaatcaccgctctgatgctgctggcttccgatgcgtttatgcaggcgaattacgcgcaagccatcgaactatggcaaaaagtgatggatctcaactcaccccggatcaaccggacacagctggtcgagtcgattaatatggcgaaattgttgcagcggagatcggattaatcatctggtgatgaagattatgttattgagctgcataaaaaataatcgaatgaacatatgccaaaaataatcactaatcagtattattgcagattaaacaaataaaaatctttccataacaaatggttattcattaatcctgccataaactcgcgttattatgcattaatgcagcgaaaagctctgttgttaaagggttgcgcaacataccgcgcaaatgatactgatcataagcgttaaaaaaatctacaaaccaacgcaacacaattcatgccctggcagtatgtcacgttctcgcgtttctgaacggggaacggcgctccattgaggaagtcattcatatgaaaaatataaaattcagcctggcctggcagattctgtttgctatggtgctgggcattctcctgggaagctacctgcactaccatagcgacagccgcgactggctggtcgtcaatttgctctctccggcgggtgatatcttcatccatctgatcaaaatgattgttgtgccgattgtgatctccacgctggtggtgggtatcgcgggtgttggtgatgccaaacagctcgggcgtattggcgcgaaaaccattatctacttcgaggtgancaccaccgttgccatcattttggggatcactctggcgaacgtcttccagcccggtgccggggtggatatgtcgcagctggcgaccgtcgatatctcgaaatatcagagcactacggaagcggtacaaagcagttcccacggcattatgggcacgattttgtcgctggtgccgacgaatattgtggcgtcgatggcgaaaggagaaatgttgccgatcatcttcttctcggtgctgtttggtctggggctttcctccctgcccgcgacgcatcgtgaaccgctggtgaccgtgttccgctccatctctgaaaccatgtttaaagtgactcacatggtgatgcgttatgcgccggtgggtgtgtttgcgctgattgcagtgacggtggctaactttggtttctcttctctgtggccactggcgaaactggtgctgctggtgcatttcgccattctgttcttcgcgctggtagtgctgggaattgtgnngcgcctatgcgggttaagcgtctggatcctgattcgtattctgaaagatgagctgattctggcgtactccactgccagctctgaaagcgtactgccgcgaattattgagaagatggaagcctacggagcaccggcgtcgatcaccagcttcgtggtgccgaccggttactcttttaaccttgatggttcgacgctgtatcaaagtattgccgctattttcatcgctcagctgtatggcattgacctgtccatctggcaggaaatcattctggtgctgacgctgatggtgacctcgaaagggattgctggcgtgccgggcgtgtcgtttgtggtgttgctggcaacgctgggtagcgtaggtattccgctggaaggtctggcgtttattgctggtgttgaccgtatcctcgacatggcgcgtactgcactgaacgtggtgggtaatgcgctggcggtgctggtgattgccaagtgggaacacaaatttgaccgcaaaaaggcgctggcttatgagcgtgaagtgctgggcaaatttgataaaactgcggatcaataattgaagattgccggggatatcccccggcaatgtgtggatgcctgatgcgacgctggtgcgtcttatcaggcctacgtcagacagcgctagcgtgattttgtaggtctgataaggcgtttacgctgcattcgacatcaacgcctgatgcgacgcttaacgcgtcttatcaggcctaccttaaccgttagttaatttttcaaactcttcacacccggtatcaaacccttccatacagctcaggttcaaccagtgcagcgccttttgcttgttcttctcgataaaaccttcttcaccgtttaagaacatcattcccgcccagtactcggaataaccggttcgggaaattgcagagctgcgtttgaaataccaggttgccttgtcatcgtcggccttaatgcccacgccgttggcgtaaatcaaaccaagcagcatttgggcatcgacggcagagtcgttctccagatcttccgaggcgttttctaacagcgaaatcgcctttggataatccggtttacccgcttgagtatttaccagaatatgcgccagcgttacttcaccttctttactgcccgcttgcgccgctttctctgcaagaacttttgcttgtggatagtccagactgaccggattggtgattttgatctgcgccaacagcgcgcaggcatcagcatcaccgctgtcggcggctttctgtgcccaatattcggctttgctcaaatcgccggagctaaaccagctgtcggcaagaaaatattgtgcgcgtcggtccccggcctctgctgcctttaaatactggctgccaggctcggagtcgttggcgtgggcaaagaatgtcaaaaacaacatcaatgcgataatttttttcattttgataatacgattgggtagggagtaaccagtataaagagttcgaatggataaaaaaanagcctccgaaaggaggctgtagaaaggactgtattacgccagtgccgcttcgcgcaggcgagttttcaacttgttgtactcgtcaatcacgtactgctcggcggcgcgctgatcggcgatcggctcgacgcgcacggcgcagtatttgtattccggcgttttcgtaatcgggcttaagttttcggtaaccagctcgttacaggcaccaatccaccactggtaggtcatgtaaatcgcccctttgttcggacgatcgctgacctgcgcacgggtgataattttgcctttacgcgagtgcacccaaaccaatgcctcatcttcaatacccagacgtttggcgtcttcggtattgatttgtgcgtagccaggttcatcagccagcgccgccagtgccgcacagttaccggtcatcgaacggcaagagtagtgaccaacttcacgcaccgttgacagtaccatcgggtactcgtcggtgagtttgtcgattggcgctacccagtcgcaggtgaagaactgcgccagaccgttcggggtgtcaaacttctctttaaacagataagaagtcccctgatcggcatctgaagtatcgcggcaaggccactgaatgaagcccagttcgcccattttctcgtaagtcgcaccgtagaaatccgggcacagatgacgcaactcatcccagatctcctgggtgttgttgtagtgcatcggataacccatacgggtggcgatttcactgatgatttgccagtccgttttcagatcccatttcggttcaactgctttgaagaaacgctggaagccacggtcagccgcagtaaacacgccttcatgctcgccccacgacgttgacggtaaaataacatccgccgccgacgcggttttggtcataaagatgtcctgaacgataaccagttccagatcttcaaaggctttacgtactgccgacagctccgcgtcagtttgtagcggatcttcgcccataatgtacgcggcacgcacttcgccatgcgctgcgcggtgcggcagctcgctgatgcgataaccggtatgagcaggcaggctttccacgccccaggctttggcgaatttctcgcggttagccggatcttttacgtactggtatcccggatacgtatccggcagcgcgcccatatcgcaggcaccctgcacgttgttctgaccacgaaccgggttaacacccgcatgtggcttaccgaggttaccggtcagcatcgcgaggctggtcagagaacgcacggtttccacgccctggtagaactgggttacacccatgccccacaggatggcggcgcttttcgcctgggcatacatccgtgccgcctgacgaatctcactggcgctgacgccggtgatatcttcaaccgactccggcgtgtagccttcaacgattttacgatactcttcaaagccttctgtacgggaagcgacgaatgctttgtcgtacagattttcttcaatannagncaggcccatcgcattcaacagtgcgatgttcgagccgtttttcagtgcaatgtgcatgtcagcaatgcgcgcggtttcaattttgcgcggatcgcagacgataattttcgccccgttacgtttagcgttaattacgtgattcgccacgattgggtgggaatccgccgggttgtacccgaaaacgaacactaaatcggtattatcaatttcgttaatagcattgctcattgcgccattaccgaccgattggtgcagacctgcaaccgatgggccgtgtcagacacgagcgcagcagtcaacgttattggtaccnnnnnnnnnnnnnnnnaatttttgcattacatagttggtttcgttacccgtaccacgcgaggagccggtcgtctggatggcatccggaccgtacttctctttgatggcgctcaggcgctcggcaacgtaattcagtgcctcatcccaggaaacaggttcgagtttgccgccacgctggcgacggatcatgggggttttcaggcgcggggtcaggatctgggtatcgttaatgaagtcccagccataataacccttcagacacagggtaccctggttggttttcccctgcgctgcctccgcccggacgattttgccgttatcgacgaccaggttgattttgcaacctgatgcgcaataggggcaaaccgtgacgacttttttcatcggtctcgctccagttaatcaaatcacgcatacgcgctctcgactacagtatgcatcttttatgccacattttatttggggtcattccctgatattacgggcactatttattcaaaactctgacgaaaaacaggctgtcgtcagttttgacgtgacgaaacgaaataccgcgtgacagccatcacacggcagacattttattttttctcgacgacgggagccgcctgatacccgctgcccagcgatttcatcaactgaatgctttggatcacccggcggctgtccagcatcagtaatgacatctcttcggcaagcaccggcaaccgggcttcggtagcctgtaagcggctggttaagccgcgctgataggcggcctcggcagcgcgctgggtgaagcgcgttgcttccacgcgttcagcctgcatttctcgctcgtcgttgagcgtttgcagacgcgtgccgttgacggcaacgtcacgcaccgcgttcagtactgactggttgtaacgttcaatcatcatgttgctggcggcgcgagtgccttcgagattggcattcaaccgtccaccgtcaaacagcggcaatttcagacccgggatgaagttgaactggcgactggtttttttgaataaggtatccaggtggatggagtccagaccgaaaaacgctttgatatcaaagcttgggtagaacagcgcccgcgcggaatccacctgatctaatgacgcctgaacataccagcgcatggcttgcagatccgggcgtctggcgagcaactcataagagagtgtcgccggaataccggtctggactcgtggtaatgccactggtttgatctccggcatatcgctggctcccgcgccaatcaatgcacgcagagattctcgcgtttcggtgatttgccctttaacggcagcaatttgtttatcgaccgccagaatctgtgcccgcgcgccgtggaaaggcacttgcgcttccagaccgtgcgccactttactttggtgcgctttcaccgcgtaatcaatcacatcgcgagtttgttctaacagatcgagcatctgatagctggcctgcatactgtaataaagctgcgctacgcccgtggtcagcgatagctctactgctgcggtttctgccagcgcggcattatgcnngcnnntggcggcggtaaccgctgagcgatgcacaccccacaaatcaagatccagtccggcaaacaaaccgactgtggcttccgtatagtacggcccgtccatacccagtgctggcgcatccatcgcataagggcttaaaaagccgttcgccgagacgcgttggcggttgagcatccctaacgctgcgacctgtaattgtgaaccggcatctaacaaatcggcctgggactgcgctttttcttcccgcagtttcgcttcggcgagggtgtgtgaaccacttagcgtccgttggatcagcgcatccagctgcgggtcattgagttgtttccaccactgcgcctgcggccagccggagctggcaagatgaatatcatcggccagtttgatttgttccggtttgagctgttgatgaggcgcagaatccttgcgtaccagggcacagccggaaatcagcgtcgtgctgccgagaatgctgcacaacagcagacgtgaaagttgacgattgatcattgcgtggctccttgtgcctgttccgtggcgggcgttaatgccggggctgtccagtctggcaagcgggcgaaaagctggcagacgtgttgctcctgttttaataaggtgggcaggatggcctgcgaggcgggtgtctcttcaagcgttatttgaggagaacggctgagtgcggttgccagaccggcagcgtatttttccagggcgtcggcaaactgacctgctttgtccggctgtagtgcgttatccagcgcctgcgccgagttccaggtggcatcccaggcgtgaagaagatcgcggccctgacgaataaccgtttgcgaacgttcaatcagtaaggcgcgttcttcgctgtccagttgacgctccagcgccacgcgttggcacatctcttcacaggcattaaacgccgcatgcagacctatacgaatttgcagataagtgcgcagagccgtgacttcctgctggcgtgggatccgcattactttacttagcatacccagcgcgccagccagtttttgcggcagcgtgcgcgcttcactttcaggccagacaaaggtgtaaatcaccgcagacaccacggtaccaatgatgatacccagggcgcgatcgcgaatttccaccaggtcgtacaccggaccaaaaacgttttcgagcgtggcgagcgcgaaggtgaccaccatctgtgtgccgatataagaagagcgttcagagctggtggcaatccatgcgcccaacaggaaaatcggtgccagcacaaacagcaattcgacaatnttgtccagccagggcatgaccagtagcgtgaataacagcgccagaatcgcgccgcaaaaggccccgccaaaacgcagcaccatcttctggtacgatgaaccgacattcggattagcgacgatcacgcaggtcagcatacaggtgtgaatgccttcccagtccacgccgctgtagaaggtgtaacagatcaaacaggcgagcagcgtttttaccgcgtagcgcatatagtctggattggtaaaagcatcagcgaccattgatggcggtttggcggcgggcgttggcggcgtattcgggtccatctgacccagttgtaacaacgtctggcagatattctccaggttacattcccgtgccgccatcgcttcactttcactgatccgccagttgctttgccagcactgaccttcggtaatggcatgctgcagcttgttgatttctgaagctaatttttgtcggaattcaataattgcctgagaatcagcaaaagaggtgggatcgtagcgattcagcgtcgagtaaatgtaggttaccgttgccacgcagctttgccaccatgcgctttgagttcgccagttggcatcgtccgcgaggcaaaagacattgagtttttgcagcgccagcgcctctctttcaatccgcgtttcgggtagcggtgcgaggctgtccgtcaggtggctaatggcatcatcaagccgatcattaagcgcttgatgcatttgcgaaatggcacgactgggaaaccacagtacgccgattaacgtcattaataacgtcgggtagaggccaacaacgatacaccacagcgttaagcgcacgaccacttccggatagtcgagcatggcggggaaggtttgcccataaatggcgacaatggcgacagcgaaaaagaccagtcccaaccgatgggtgcgcatcaaaaacatgcagcccatcaggatcggcccggcgatgatcaagcggatcaacggttcgccgtatgaccatttgtagatcaaaaacaggctgccgatctccagcaccgtggcaaccacaaacaagatcgcgacaaatttggtgtaaaacgcgttcgactgaataccgtaaaacagcactgccagcgataacgccacaaaagggatctcaaaagtcatcgagatcagaatcaccagcaggcagcctacccagagttgcacggtctgcggcacgcgacctggtcgccgctcgcttaactcttcatgaaagaacgccagcagcctgaccaccggtaatggcagggagttgagcgcgctcattattgcggctcaagattagcgactgccgaagcgccgatgcggaacatttccgggtcaggtttatcaaccatgattttgaccggaaaacgctgggcaacacggacccagttaatagaacgagaaactttcggcaggccgcccagcaccaggccgccgtcatccggtagcacgccgtagccaattgaatccactttaccctcgaaagttttgccgctgtcactcatcaggcgaatcgttgcaggtgtacctgagcgaatatttttcagatcggtttcgcggaagttggcgatcacttaccagtgacgagtgtcgattagggtaaaaatagggcgcatggcagaagcaaattgcccgacggaggttttgagggaaatgacccggccatcaaacggtgcgcgaacggtcgccatttccagatgcagtttggtcagggcaatatccgcttcgaccgccgcacgctgggcaactaatgcatccacgccgctgacggcgctggcggctgactgcgcctgcaacaatacagcattaagatcggcttctgcagcgcgctgcgcggtcctcgcacggtcaacgtcttccgctgagacaaaaccttctttcagtaatggctcggtgcggcgtaatgtatctgtggcctgtttagcggcggcacgggctttttctaccgtggcgttaaccgagtcggcaccaaactgttgcgcgtcaacgctacgctgggtgagcataatttgcttatccagtgccgcgagggaggcttcagatttcgccagattggcttcgtacgggcgcgggtcaatgcggaacagcaaatcgccctgtttgactgcctggttgtcggtgaccgccagttctacaatgcggccgctgacttccggcaccacatcaatggtatctgctgacacgtaagcgtcattagttgatggcgcactgtctacgcgccagataacgaaaacaagggcaaccagcgccaacgcaaccactaacagagcagggaatttactgcgaggagcttttttcggcgtactttccatgagcgcgtctcaaatagattagaaaaatgccagccagaacagcatggcgtagagagcaaaaagggcggtataaataattccgacaaatgccagcttgatatttgcccgctgaataactcgcctcgtgatgagcgtcaatataaggctggcaatggcgcagaaaaaccagctgggataataagcgccgatcaccgggattgccggagataatgagcatcccgaaaccatgaagacgggaattatccaggctgtttttttgagttgcatcgccatgcgagagagaactgttggcatattaaatacatcctgtctgctgcgaacaatatctgtagtgaatatcaatatccattgaatgcgtcagtatggctattttcttgatgaataaaaatagctttattcagccaccgcattcataacttatatattttatttatnaattggctgtatatatttttaaaataaatgcttttgggggcttcagcgcccccaaaagcgagtgacattaatttggggttacgatattcacccacaaatcgaaattatccagacaggcgataatttcttccagtttcgcgccattgccaataattttggctttcttcgctttcaccagatccgccatttttgcctgtccggtcagcacggcgtgcagatcttcacggctgatgtagaaagaggcgtcggcttgcggttgcagtgttttacggtagttaagcacgctatcgttcagcgtcaggttgaggttatcgccgttgctcatattgaagttcaggctgatatttttacccgcagctttcgcgctatcgaggcgaacggccataaagtcgaacagcatttcgaccgacattccgcgaatggtgtccggggaaccggtggtgccgtggctgaacttatgcaccccttcgcgcagctctttcgcgccggtcaggtagaaaccgcgccatgtggcggactcggcctgatagcccagctgttcaaagttattcgcttgcagattcttcgccacctggtcacccgggttggcggcaatcacctgtttcagtagttctgccgaccagcggtaatcaccttgcttattcgcttcttgcgccaggttgatgacacgggcagagccgcccagcgctttcacgtaacgtttgcccatctctacctgaccatacggatgcaggttagccgggttaccgtcgtaatagccaagatagaagttatacaccgcgcgggcgttgtggctgacagaaccgtaatagccacggctggcccagttattggcaagtgcaggcggcagcttaatcatgtcgccgatttcattcatggtgtagccctggttcgccaggtgcagggtctggtcgtgaatgtacgtgatagtatcgcgatatttaccaatataatcattgatatgcttattgccccagaccggccatgtgtgcggcataaacagtacttccgcgtcgttaccccacatatccagcgtttcgttcaggtactcggtccacttgctggtatcgcgggttttcgcgccgcgcagagtgtanaagttgtgcagggtatgcgtggcgttctcggcggtacacagggctttcagggccggaatatagaagtgcatttcggctggcgcttcgctaccaggggtcatcaggaagtcaaactccaggccgtcgataatcatcttctcgccagttctgacgatagttttagtcggtgcaataatgctcgggtcgcccgttgccagcgtcacgccaaggccattacccacgttgccttgcgcgttgtgcggcagtaacagaccgtaagagtagagcgcacggcggctcatgatgttacccgccagcacgttttcgctgatggcttcgtccataaagccagcaggggcaatcacctgaactttgccggatttaacatcggcttcagagataatgcctttcacgccaccatagtggtcggtgtggctgtgagtgtagataacggcaacaatcggtttttgcggacgatgctggaagtaaaggtcaagtgcggcttttgcggcaggcggcgtcaccagcgggtcgatgacaataatgcctttctccccctcaacgaacgtaatgttagagatatcctggccgcgcacctgatacattttatcggtgactttgaacaggccagaaatgccgttgatctgcgactgacgccacaggctggggtttacggtttccggcgcagcggcattaatatcaaatttgtaatcgtctgcgcggtagtaaactttaccgttcgcatcacgcagaataccttcatccagcagcggggcgataaatccacgctgggcatcgtcaaaatcctgacgatcgctaaacggtaatgatttggcgtaattctgattaacctgttgggtatattgagtggcggctttcgcttcctctttcgcgttagcggtatttaccatcatgccgctggcggcagttaacgcaataacaatcctgctcaaacggaataaccgagagttattcatataaatctccatttatcatttatgtcgtaaatatgtaatccatgcaaaatacgtcatttaaagctggcgttatcataattgggaaattgcgactttaataagtggaagtgtgagcggaacgatccattttattaggcatttgtgctgaagagggaaaagtacgacatatttattactatcatcaataatgtgacctgacttatatttttattatttanattactttcagctttcacttcgacaagaagtacgcacaatgattaatcagatgaatgatgcggagtgtaaccatgaaacccgtcntgctggtggtgnatgatgacacggctatctgcgcactgttgcaggacgtgttaagtgaacatgtctttacggtttcagtctgccataccggacaggaggccatattgcgtattgagggcgatcctgacattgcgctggtggtgctggatatgatgctacccgataccaacggcctgagggtattgcagcaaatccagaaactgcgtccgacattgccggtggtgatgttgaccggcatgggcagtgagtctgatgtggtggtcgggctggaaatgggcgcggatgattacatctgcaaaccgttcaccccgcgggtggtggtcgcacgactgaaagcggtgttgcgacgggttggcgcgctggcggttaatgacgagaaaagcgccgggctgtcattcaatggctggtatctcgataccatgcgctgccagttgcacaatccgcttcagcaacatgtcgagttaactcagggcgaatatggcttgttactggctctggcgcaaaacgcgcgtcgggtattgagccgcgagcagttgctggcgttcacccacagcgacagcgtggaggtgtttgatcgcaccatcgacgtattaatcatgcgcttacgacgcaaaatcgaactcaacccgcatcagccgatgttgattaaaactctgcgcggtctggggtatgtcttcgctgccgacgtgcattaatccgacatttctgtttgcagctcttccagcgttttcgccccgtcgatggcattggcgcataacaggcttgcccgcgcgcaggcgtgtgccagtttgatgctctcggtaagcgtccagcgttcatggcagccatataaaaatccggcacaaaatgcatcgcctgcgccgacgctgccgataatttcccgttgttctaacttttgcgaagggatccacacgccgccctgttctggggtctctccccacgccccttccgggcagtggatcaccacccgctggcgcacgcccgcatctaacagttcacgcgcggcggcagcaatatgcgcgatatgcggttcgccgttgggtaaccgaatttccagcccgctaaactccccggcctccagttcgttaattaccagataatccagatggcgcaacgcgggcagcaccagcggctgataacgcggatcgcccttacgggagaccaggtcgagtgaggtttcaaagccagtatcacgcatttgcgccagcaggcgtgcgctacgggtgccgtaaacatcgtccggcatatccaggctgtcgagcaacagtaaatagccgagatggaaaatcttcatggtgttatcgagctgatcgaacgccggaagatccaaaagtctgtttgcacccggcgaatggaaaaacgtccgctgcccgcttgggtctgtcatcacctgcgacatcgacgtcggggcaaaggtagtgcgctgcacatgctgacgattgacgtgatattgctcaagcatcgccatgatgtaatcgccgtcgctgtcctgaccgattagcccaaccgcctgtaacggcagcccggtgcgcattttcgccagcgtcagcaggacgttaagnnnngcaccgccggtggagcgttcgctgtgggtgatctccgccagccagccgcgctctggccactggataatctgatggacgtggtcaaccaacatattgcctgcggcgataatccctttacgctccatcatgcctgccccgcactgccaaaaatacgcatctgttgtgcaaccgtatcgctgatggcggcttccactgccagcagtaactcggcaaactcgtcatacatcggctgacggtgcgccattcgggcctcaacggcagccagcgccgcttgcgacatgccagtgtagaaattgattttgtggatacccagttcgatggcgcggcggaaatcggcatcgctaatccctgagccgccgtgtaataccagcgggatagcagcctgctggcggatagcgtcgaggcgcgggaaatcgagtttcggttcgccgcgatatttgccgtgtgcattgccaatcgccacggccagcgcgtcaatgccggtacggtcgacaaaatcacgcgccagttgcggatcggtaaacagggattcatcggcatgaccatagagtgcaccgcnttcgtcgccacccaccgcgcccagttcagcttctaccgatacgccaacggcatggcacattttcaccacttcccgcgtctggcggacattttcttcataccccagcgtggagccatcaaacattaccgagctgaatcccagccgcaacgcttgcaccaccgattcaaaatgcagtccgtgatcgagatttaacaccaccggaatgtcatgacgcgccgcttcaaatttcactgtctcgaccagggaatccagcgagatatatttaaaatgtacttcggcaatgttgataataaagggcgaacgttcttgtctggcagcagcaaacaaggcgcgtaaaaagtgcgagtccagcacattaaacgcacctaacgaatagtgatgttcgcgggcatgtgccagcccttcagcgagagaaatcaatggcataacgttatccttattcagcggaactggcggtattcgttacacaataccaactgtgcaggttcgtcttcgtcaatcaggttgtagcggtccagtggctgtaaaaagtggttatcgtggtcgtcgtcattaacagaagagacttcgccaaccagcacatcgccaaaaccggcttctgcccaaaagctgtgatacaggccgggcggcaggcagatactttcgccgggagacaggcgcaactgagagcctgcagtatgtttctggcggcagccgtctatcaccaccgtaatgtcactatcagccgtttgctcgttactatcggcattccacagttcaacaattaaattaccgccgccgcgattgataatgtcctcacgcttacgccagtgaaaatgcattggcgtgacctgcgcatcgcgcacatgcatgatcttctcggcgtaacatttcacatacggcattccttttgctgagccgttacgtagggtaaacagcgtcagcccgtgtgctgcaaagttgttgcgaccaaaagcggtaacatcccagccgagtttaagatcaaaaacctcctcccacgcggcggtgtcgagctgctgccattgagcaggcgagaaactggcaaagggcggcagatgtacgtcatgttgcgaaaagaattgccgtgtatggccgagaatgtcgtttatagcggagcgtttcatcgaaagcgttctccttagcggtgaccgggcagctgcgnnnnccggcgtgtggacttatttcaccgtccagcctttgtaattgccgacgttgtttttatcgatcatcgtcaccgggatcagcaccggctctttcggcgcaggtnnnnnctgcaaaatgtcgtagccaatttccaccgctttcgctgccatcacctggggatcttgcgccggagtagcgacaaacaacgagttctcacgcttgagcgcctcttcggcgtccgggcttccgtccacaccgacaataaagaactcgttacgttgtgcctgttttgctgccagatcggcaccgattgcggtgggatcgttaatcgcaaatacgccgtcgatcttcggatttgccgccagcagtcccgtcattacctccagcccgccttcacgactgcctttcgcgttctggttgtcagagagcactttgatgtcaggatggcgtttaaattcagtctggcatccttcgacgcggttttgcacggcggataccggcgggccgttgatgatcaccacgttgcctttgcctttcaggcgatcggtgatgtatttacaggccatttcgcctgcctgggtgttatcggaagtgatggtggcatcggcaccttctgccgctacgtcaaccgcgacgaccacgatcccggcatctttcgcccgtttcaccgccgggccgatcccttttgaatcggcagcgttgaggataatcatatcgacgttagcggcgataaagttgtctatctgcgacacctgctgacccagatcgtagccgctggaaaccagcgtcactttgacgttatcgcctgccagtttgcgtgcttccagctccgcgcctttggtgatctgcacgaagaacgggttcgccagatcgcccaccgttacgcctattgatttcagttctttcgcctgggcgaacggtgctgcggccagcagcgcgcctgcacagagcgcggtcactaagggcttcaatctcatgctgtattcctcatgtgtttatgcactttgatggtgtcgggtacggtatttgtcgatcagcaccgcaatgatgatcaccgcccctttgatcaccagttgccagaagtaagagacgcccattaaggtcatgccattgttgagcgtggcgataattagcgcgccgaccagcgtgccggtgatggtgccgatgccgccgacaaaactggtgccgccgaggatcaccgctgcaatggcatccagttcgtaacccatgcctaagttgccgttggcgctgtacagccgtgaggcgctcataatcccaccaagcccagaaagcaggccgctcatgccataaacaaacagcagcaccagccagaccttaatgccggtaagacgcgccgcctgcatattgccgccnacggcgtagatatgaacgccaagcgtggtgcggcgcagaataaaccagcacaccacgatcaccgccagcgcaatcaccaccagccatgggaccggcccgagatagttgttgcctatccactcgaaattaatgttggagttgataaccgtggtgccgtccgccagcagatacgccnccccgcgcagcgccgtataggtgccaagcgtaacgataaacggtggcaatccggcaaaggccaccagcgcgccgttgaacagccccagcagcaggccgagcatcagcgctgccgggatcgacagcatggcgaactcagggctaagggagacgaccatcgccgccaccgctgtggtgccgaggatcgaacccacggaaagatcgatcccgccggtcaaaatgatgaaggtcatccccgccgccagaacaatgttgatcgatgcctggcgggtaatattcagcaggttgctttcggtaaaaaagtttggcgtgataaagccaaataccgccacgatcagaatcaaaatgggcaagatgccgaccgtttgcatcagatcgctcatcagcatttttttggcagaggtttttgcagaggtcgtcatgaggttaccgcctgggaatgggcgtcgttgacgccagtcgctaaggtcataatgttttcctgggtgatgtttttgccgtttaactcaccggcaatgctgccttcgcgcatcacatagacgcgatcgctcattcccactatctccggcagttcgctggagatcatcaggatcgccacgcccttgcgcgccatctcgttcatgatccggtagatctcacttttnnnnccaacgtccacgccgcgggtgggttcatcgagcagtaaaatgcgcgggccaatcgccacccagcgggagatcaacagtttttgctgattgccgccggaaagcccgcccgcgcgtacctgggcatgaggcacgcgaatgttgagcaacttaatggcgtcatcggaaatggtttgcgcttttttgcgattgagcattccccagcgggcatcgcgctccagggttgccatggtgatgttttcggctgctgccatttcaaggaataagccttgttctttgnggttttcggtgagaaaaccaatgccaagatcgatggcttcgcgcggggagtggatcaccaccggttcaccatcgacttcaatcattccgcctgtcgctttccgcacgccgaagatcaactgcgccagttcggaacgtccggcacccaccagtccggcgaggccaacaatttcgccggaacgcaccagcaggctactcggctggactttgccgccgtcggtcaggtggtgaacattcaggcgggctttaccgagcgggatatcgcgctctttattgaacagatcgctcagtggcctgccgaccatcatccgcaccagctccccggcattgaggttatcgcgggtcaggctgccaacgtattgcccgtcgcgcagcacgctgacgcgatcggaaagctcatacacttccgccatgcggtggctaatgtagataatcgccatcccttcatcgcgcagccgcataatcagttcaaacaggcggtgagtttcgcgggaggaganggcagcggtgggttcgtccatcaccagaatgcggctgttgcgatgtagtgcgcgggcgatttcgacctgctgttgctcggcaatggtcagcgtcatgaccttatcgctggcgttaaactgcgcgccgaggcggtcgatcactttttgcgcctgcactagcatctctttacgctgcaccagcccgccgtgggaaagctcgctgccgagaaaannattttctgccaccgacagattcggtgccagctgcatctcctgataaatcagcgtaataccggcgcttaaggcatcttttggcgtgcgaatgtgaaagggcttgccgtctatgagaatctcgccgctggtggcggtatacgcccccgccagcaccttcatcagcgtgctttttcccgcgccgttttcccccatcagggcatggatctcgccagggtagaccgtcaaatccacccctttgagtgcataaaatttgccgaaggctttggcaatattgcgcntctccagaactggcgtgctgttcatggtggactcctgcgaggttgtcgatatcagcactccatcacaggaaagtaaatgcaaaatgtcagaagccgttcatatttgtcatattgcgatttttcttcacggagcgtgatatggcgcaccccggacgtcacttttttgccagcgcncgcgggcgattgctgcttttgaatttgctggtggtggcggtgacgttgatggtcagcggcgtggcggtaatgggctttcgtcatgccagccagatgcaggagctggtgcagcagcaaacggtggatgatatgaccggcagcctgaatctggcgcgcgacacggcaaacgtggcaacggcggcggtgcgattgtcgcaggtggtgggagcgctggaatataaaggcgaagccgagcggttgcaggagacacagcgggcattaaaaagctcgcttgcacaactggcgaacgcgcctnnnncgcagcaggaagccgggctggtgacgcgaatcatcacgcgtagcaacgaactgcaaaccagcgtcggcggtatgctggagcgcgggcaaaggcggcatctggagcgcaacgcgctgttaagttcgctgtatcaaaacttaagttatctgcggcatctgcaaaaagtcactcacgcgcaagatgatattttgcttaacgagatgaaccgactgattgttgccgctattgccacccccgcgccgcaggcgattattcatcaactggtcggggtaatgtctgcgttgccgacccacagcgatacgccattggttaatacgttactcaatgatttcaatgatgaaatgcgtaaactcgcgccgctttctgccgctctggagcaaagcgatctggcaatcagctggtatatgtttcacatcaaagcgctggtggcgatcctcaatggcgacatcaaccgttacgccgaacaggtggcgacgctctccggtcagcgtgtggcgcaaagttaccaggatttgcgctccggcgagagggtgatcatgattttcgccctgnnnnggtggtgatcaccgcgtttgccggctggtatatctatcgcaacctcggcactaacctgacggcgatttcccgcgccatgagccgcctggcgcacggcgaagcggacgtcacttttccggcgttacagcggcgtgatgagttgggtgaactggcgcnnnnctttaacgtttttgcccgcaataccgcgtcactcgaacgaacctcacggctgctaaaagagaagaccacgcagatggagattgcccaaactgagcggcaggggttggaagaggcgctattacacagccagaaactgaaagctgtcgggcaactgacgggcgggctggcccatgattttaataatctgctggcggtgattattggcagcctggagctggtgaatccggactcgccagacgcgccgcgaatacagcgggcgctgcaagctgccgaacgtggggcgctactgacacaacgactgctggcgttttcccgcaagcagtccttacatccgcaagccgttgaactgaaaacattgctggaagagttaagcgaattaatgcgccactccttaccggcaacgctggcgctggagattgaagcgcagtctccggcgtggcccgcgtggattgacatcagccaactggaaaatgccatcatcaacctggtgatgaacgcccgtgacgcgatggaagggcagacgggaatcatcaaaattcgtacctggaatcagcgcgttactcgcagcagtgggcagcgtcaggacatggtggcactggaggtcatcgatcatggcagcggtatgtcgcaggcggtgaaaagccaggtatttgagccattctttaccaccaaacagacgggcagcggcagcgggctgggtttgtcgatggtctatggttttgtgcgccagtccggtgggcgcgttgaaattgaaagcgcgccggggcaggggacaacggtcagattacagcttccccgcgcgctgacggcggcgaaaaacctatcgccagcggcagtagaacaggcttctgtcagcggcgataaactggtgttagtgctggaagatgaagccgcggtgcgccagaccatctgcgaacagttgcacctgctgggctatttgacgctggaagcaagcagcggcgaacaggcgctggatctgctggcggcatcagcagaaatcgatatttttatcagcgatttaatgctccccggcggcatgagcggcgcagaagtggtcaatgcggcccgcaaactttacccgcacctgacgctgctactcatcagcggtcaggatttacgccccagccataaccccgcgctgccagacgtggcgctgttgcgcaaaccctttacccgtgcgcagttggcgcaggcgctggggcaagagaattgagaatcctcctctactcgtaacaggcacctttgcctaccttgtattaactttgttgcgaggccgagtttatgaaacgccactccacgctttttcttttcaccctgctcacgctgaccaccgtaccggcccaggccgatattatcgatgacaccattggcaatattcagcaggcgattaacgacgcttataaccctgaccgtgggctagattatgaagattcgcgcgacgacggctggcagcgtgaagtgagcgacgatcggcgcagacaatatgacgaccgccgtcgccagtttgaagatcgtcgcaggcagctggacgatcgccagcaccagcttaatcaggagcgtcggcagctagaagatgaagagcggagaatggaagatgagtatgggcaatgatgttgggtatggggcaggcatcgcccctctggggananggttagggtgagggggccancacncacattccctctcatcacgccaccccaatctccatcccatcaaaccccgcctcaaaccccgacggcagtgcgttttccatcagccacgcatcaaactggtggctgatatgggtcagaaccacgcgcggcgagcggataacctgattcagcgcaagcacggtatttaaatcacagtgattacgcggtgcatcctcgcgcggcgggtggctgcaatcaatcaccattacctgcggctgattattgcgtaaaaatttcagcgttttttccggcaagccagcggtgtcagacagccacgccacccggctgtgcgccgtttccagcagataaccgaaggtcagttttgagtggttgagcggcaggggtgtgacctgtaacccctgcaaatcaaacaccacaaacggttccaccgtgtggctgaaatcaagcaggcccggatgtttaaacagatcgtcgcagccctgttcatccggtgggccgtaaaccgggatcggatcgcccacgccccagcgcagcgggaatagcccctgcacgtgatccatatggtagtgcgtcagcaaaaactgctggaacgatccgggcgaccagcgatcggcgagatcgtgccgcccggcgtcgatcagggtgatcgcctcgttaaacttcactacgccgctgcatggctggcggcgatagtgcggcgagcgccgcgctctggcgcaggccgcacactcgcagccccatgccggaacgccctgtgcgccgccggagccggtgagcgtgagggtcaggctcatgttacagcaccttggtgaagcggaagtggctctgctcgtagccttcgcgcagatagaaacggtgcgcgtcgtggcgcttcacgttggtcgaaagttcggtcatttcggccccggcctggcgggcttcttcttctgcccacgccagtaacttactgccgacgttcagaccgcgcgcctgcggcattaccaccaactcctgaatttcgccgatccagttgacatgatgcagatgaaactgcaaatgcaggccgatcataccgacaacttcgccatccagcagcgccagatggtagcgcatgttcgggtcgcgcaggttggcgttaaagcccacgcgaaacgcgtggtggtcaaactccgcctgttttagctcgcaaatcaacgcgtaaaccgcgtcggtgtcgtactgcgtggccgggtnnnngctcacaagcaggcatggtgtttctccttctgatggattagcgtcagcagcgtgtcgaccgactggcgcaggctgccgtcattattgagcgtatggcaatcctgtggagtatagcgggcggcgcgcgccagccgggcgttaatttcactggcgttttcgcggccacggttttccaggcgctggcgcaggatntctggcgaaacctgtaagcaaatgggcagcagcgccgattgatagcgcgcccgcgcctgcggcagatgggcgcgtgagccgttgaccagcacgtcgaatccagcgtgcagccagaggtcaatctcgacgccgacgccataatacagaccgttagcgtgccagcttaaggccagcagattttgccccgnncgggtaaaaaattcctgctcgctcagggcgatatggttttcgcttccggcgctggcgtcgcgcgtgatgtagcgatgcgccaccagtagctgagtttgttcccgcaggcggagttccgccagcaggctatctttcccggagccggacggccccattaaccaaatcagttttcccatcatcagaacacccttttaccctgacgccagacgtggtcgatatgaatgtgattgcccttgcgatgcgccagcaccaggtcggcgcgtttgccctcgccaatcaccccgcgatcctggagattaagcgcctgcgccggatttttggtcaccagcttcaccgcctgcggcagcgtaaagcggttgctctggtcatcggcgacgcggaacgccgcatccagcaggctggcggggtagtagtcggaagagaggatatccagcaggccaagctgtgccagttcactggccgccacgttgccggagtgcgaaccgccacgcacgatattnnnnncgcccatcagcacgttcatgccatgcttgcgcgaggcttccgctgcttcaaacgtggtgggaaattcggcgatcacgctgccaagctggtgagattcggcaacgtgggcgtgcgttgcgtcatcgtggctggcgagcgcaatttgtcgnncgcggcacattgcggcgatggattcgcgattcggctgcgaccagcgtgcggcaagcgccagctgttcctcttcatactgctgcatctgcgcatcggtgagcgagtatttgccctgataatattcgcgatacttctcgcggttggcgaactggcgctggcccggcgagtgatccatcagcgacaccagcgtcaccggctcgcgctgcaccagcttttcaaacagcggcagcgtggtgtgatgcggcagctcgcagcgcaggtgcaggcggtgctcggcgcggttgacgccgcgtttctgcgtctcttcgatggcgttgatcatcttctccagattctccagccgatcgccgccgtctcgcacgtcgccaatcgccacggcgtccagtacggtggtgatgccgctcgccaccatcagcgcgtcatggctgctcatcgccgagtgggcgggccagtcaactttcgggcgcggggtgaagaatttatcgaggttgtctgtatgcagctcaatcagccccggcagcagccagccgccttcgccgtccatcgcctccggcaggcggctctggctttcggcaaaggcgcggatttcgccgtcctgcatctccagcgaaccgtttaccacttcgttttccagcaccagtttgacgttattgataatcatgaagaggctcccattgggtgcaggcggtcggcgacgtcattacgtacggcttcgtcatggaaaatgccgacgatggctgcgccgcgggctttggcttctcggatcagttcgactacggcggcgctgtttttggcgtccagcgaggcggtaggttcgtcgagcagcagaatggggtagtcgacgataaagccacgggcgatgttgacgcgctgctgttcgccgccggagaaggtcgatggcgcaaggcgccacaggcgttccggcacgttcagacgggtgagcagacgcgcggctttagcggcgcaggcttcacgcggtacgccggtatcgagcagcggctgcattactacttccagcgccgaaatgcgcgggataacgcgcagaaactggctcacccagccaacggtggttttgcggatttccaccactttgcgcgctggcgcagtgaccaggtctacccactcgtcaccgtgtttgatctggatttgcccttcatcgggcagatagttggcgtacagcgagcgcagcagggttgatttgccgctgccggagtggccgtggagcaccacgcattcgcccgcgttgacggtgagcgaggcgcggttgaggacgggcaagcgcacgccgttttgctggtgcaggatgaaggttttactgacgttttgtacgttaatcatttttcgcctcgtggttcgggtgtcggatgcgacgctgatgcgtcttatccgacctacggggagcgcatttgtaggccggataaggcgtttacgccgcatccggcaccggctcaattctgcaaaaccgatgacaccagcagctgtgtatacggatgatgcgggtcgtcgagcacgcggtcggttaacccactctccaccacttgcccctgcttcatcaccagcaaacggtccgccagcaggcgggcgacgcctaaatcgtgggtgacaatcactaccgcgaggttcagctccaccaccaggccgcgcagcaggtcgagcaggcgggcctgcaccgacacatccagcccgccggtcggttcatccataaacaccagcttcggatgcgtcaccaggttgcgggcaatctgcaaacgctgctgcataccgccggaaaaggtggtcggcaggtcgtcgatccggttggcgggaatttccacctcttccagccacttctgcgcggtggcgcgaatatcgccgtaatgacgcgccccggtcgccatcagccgctcgccgatattgccgcctgccgagacctggcggcgcaggccgtcgagcggatgctgatgcactacgccccattcggtgcgcagcaggcgacggcggtcggcctcgctcatgccatagagggaacggttttcatagtgaatctccccctgctgcggcgtcannnnnnnngnnattnntttcagcagcgtggtcttcccggagccggattccccgacaatgcccagcacttcccccggccataaatcaaaagagacatcgctaaagcctttgcccggcgcgtaaaggtgggtcaggttattgaccgaaagtaacggttgattcattggctttttgcctcgctctgttggcggcaataatcggtatcggagcagacaaacatgcggtttccggcgtcatccagcaccacttcatcaagatagctgtgggtcgatccgcagatggcgcatggctcatcccactgctgaacggtgaacgggtgatcgtcgaaatcgaggctttccaagcgggtaaacggcggcaccgcatagatgcgcttctcacgcccggcnccgaagagttgcagggcgggcatcatgtccattttcgggttatcgaatttcgggatcggcgacgggtccattacgtagcgcccgttcaccttcaccggataggcgtaggtggtggcgatatgaccgaagcgggcgatatcttcatacagcttcacctgcatcacgccgtactcctccagcgcgtgcatggtgcgggtttccgtttcgcgcggctcgataaagcgcagcggttcggggatcggcacctggaaaataatgatctgatcttcggtcagcggcgtttcggggatgcggtgacgcgtctggatgaccgttgcatcgtccgtgcgctcggtggtgtttaccccggtcacgcgcttaaagaagttgcgaatcgacacggcgttggtggtgtcatccgcgccctggtcaatcaccttcagcacgtcgctttcgccaatcacgctggcggtaagctgaatgccgccggttccccagccgtacggcattggcatctngcgcccgccaaacggcacctgataaccggggatcgccaccgcttttaagatggcgcggcggatcatgcgtttggtctgctcgtcgaggtaggcaaagttgtagccgctcagattagccatggttctgctcctgttgcagacgtttgagtagctccagttcggcctggaaatcgacgtagtgcgggagtttgaggtgcgagacaaagcctgcggcttcgacgttgtcggcatgtgccagcacgaactcttcatcctgcgccgggcctgtcgcgtgctcgccgtactccggggcttgcagagcgcggtcgaccagcgccatcgccatcgctttgcgctcgctcatgccgaacaccagcccgtagccgcgcgtgaagtgcggagattcatccggtgggtcgataaaaccgttgaccatttcacactcagtcatcagcagttcgccgacgttcaccgcaaatcccagctcttcgggcacaatcgacacgtcgatgtaaccactgcggatttcacccgcgaacgggtgattgcgcccgtaaccgcgttgggtggagtaggccagcgccagcaaatagccttcgtcgccgcgcatgagctgttgcaggcgggaagaacgtgagcaggggtaaaccggtggcgtgcgggtgatgtcatccggctgtgcgccgctatcctcttcaaacttcgccagcccctgacgcgccagcaggctgaaaacgtgcggcgacggctgctgttcgctgtcggcggtggtcagcgtcggcgcttcgccgtttgccagcagggtgaaatcgagcaggcgatgggtgtagtcgtaggttgggccaagcagctggccgccgggaatatctttataaaccgctgaaatacgccgttcgagacgcatctccgtggtgtcgagcggctcgcttaccgcgagcttcgccagcgtggtgcggtaggcgcgcagcaggaaaattgcttcgacgttatcgccgctggcctgtttcagcgccagcgccgccagctcgcggtcggcaatgccgccttcggtcatcacgcgatccaccgcaagattaagctgctgttcaatctgggcgacgctcagttcaggcaaatcggtatcgccccggcgtcggctctcttgcagggcgtgggcggcgtcgatcgccttctcgccccctttcacggcaacgtacatcagcacacctccacatgagtggttcgcggaacagccagcaggcgctcgccgcaggtcaggatcaggtcgatgccgagcgggaacgggtgcgggcgctcggtgagttcgtgcagaatgcactccggcagctgcggggcgatcattcgttcttcggcaatacccgcgccggtgagacgcagcatgcgcccgccgctcaggctggcgacctgtaaaatcagcgttgcgcccgcttccggcgcaacggcggtgccggtggaaagggcgttaagctgttcgctggaaatcgcctcatccgttaccgcgaaggtcgcctgttccggctggctgaccagcggcgcgttggtatgaaaacgcaggctctggctgacgatatcgttgctcaatggcgcggcaagccacaccggcgtgtcgttatcggccagcgtcagcagcacgctggtggtggcgatattcagcggctgccagccgcgtttgagctgatgcagggcgacaatcacgcccggctcgctcatggcctttaacaggcgacgaaaactgtgctgggcatcctgcacgggaagcataaaagcggtttccagggtcatgcgttgtctccgcgaaccatcgtaaagaagtcgacccggctggcgttcacttcggcctggcgtgcggcaatgcgtgccatacggtcagcgtccagcggggcaataagcgtttctgataagttttgaaaatggcgggtttgctgcatcagcgcgtcaatcagcgcgcagcgttcggcgtgctgtttgtcgcgccccagcacccagctgtagccgagggtgccgtcagtcagacgtacggcggcgcgggtcagcgtggcgtcgccggcaaaaaagcgttcgccggtgccgcccatccgcgcctgaatctgtaccaggccagtttcagcggcgcggatcacctcatagttggcggtgatgttcagcgcgttcaggcgggctgccagttctgccggttggctgtgtgccagtacggacatccagtgctggcgggtcgcggtatctgcgtgcattcagtgctccatagtgaattcaatcatgtcggcgcgcgtcaggctgacggagtactccgccgggctgctttcaccgtcacggtggttaagggtgcgcacgcacagcagcggggacatattcggaatttcaagacgctggcactctttggcctgggcgcggcgggcgctgatccgcgtctggctgcggcgcagtgcaatccccgtttgctcgcgcagaaaatcgtgcagcgagccgctgtcgaagcgttgcagcgtcggccagagggtgaggtccgcgaagtagtggtcgattaaacagagcgcgatgccgttgacccggcgcagggtgcgcagatggatgacgttctccccctcggttatccccagcgcgtcagcgacgtgaccggaggccgggcgcagcacagacagcagtttttcgctggtgggatggctgccctgatccagcagattctggctaaaacgcgcctgggcgttgagcgggtaatcgaacgggcgcatcagcaccagcacgccgacgccctgacggcgctgtacccagcctttttccaccagttggtcgatggcgcggcgcagggtgtggcgatttacctcaaagcgcgccgccagctgctgctcggcgggaagatagtcgccgcagcggtagtgttgacgaagctcctgctcaagttttgcggctatctcctgatagcgtgttgggtagctggtcggatgtgtagacaagtgcatagctatcaatgcctcgctaatcagataaagtgcttacgcaaccgttgagagaggaaatccagcaggctgaccgtgacgataatcagcaccatcagggcgcaggtttgctggaactggaaaccgcgaatcgcttcccacagcgtgacgccgatcccgcccgcgccgaccatgccgacgacggtcgccgagcggacgttggattcgaagcgatagagggagtaggagatcagcagcggcatcacctgcggcagcacgccgtagaggatctcttcgagcttgttggcgccggtggcgcgaatgccttccaccgggccgggttcaatcgcttccaccgcttcggaaagcagtttggagagcacaccggtggtgtggataaacagcgccagcacaccagcgaatgggccgaggccgacggcgaccacgaacagcatggcgaagaccatttcgttaatggcgcggcaggcgtccatcaggcggcgcacgggctggtaaacccaccacggcaccaggttttcggcgctcatcaggccgaaggggatggagagaaccaccgccagcgcggtgccccagacggcgatttgcagcgtgacgagcatttcggtgaggtaatcctgccactggctgaaatcgggcgggaagaagtcggcggcgaaggtcgccatgttgccgccgtctttgatcagcgtgagcggggccatttccgcgccctgccacgagacgaccaacacggcgagtacaacggcccagctcagaagcgagaaccagctgcgcttgggtggggcgatggtgatggtttgcatgtttggctccggtctgtaggccggataaggtgcttgcaccgcatccggcatcaacgcctgcacattgtcggatgcgacaccggggcgtcttatccgacctacgatttactgcatcgctttacttaccgaactcatcgcgcttaacgcgttgttcaggcggtccaggtcatccagctgcgcttgaatctcggtggtttttgccagcttgtcctgctcattcagccctttattgcctttcacgctttgcatctctttaaacagtgcgagctggcgaatcggcaccagttgcaggtcgctggaggcgcggaacggcgcccagcccaggcgttccagcaccgctttctcttccggcgtcttgccgtaattcataaagaagtcgtagatcttgtctttggtggtttcggaaaggtttttacgccagacgatcggatcgcctgggatcagcggtgacttccagatcactttcagttctttcagcttctccggcgcggaggttttcagcttgtcgaggttttcggtgttgttggtcgccacatccacctgcttgttggcgacggccagcgcgttggtttcatgcccggcgttgacggtgcgcttgaagtcactggcggagatattgtttttggagaagacgtagtagccggggacgaggaagccagaggtggagttaggagcgccattaccgaaggtgagatctttccgcttcgccagcagatcgttcaggttgttgatcaggctgtctttgttgacgatcaacacgctccagtaacccggcgatccatccgccgcgacggtctgagcgaagacctggccgttggcgcgatccactgcttccatcgccgacaggttgccgtaccaggcgatatccactttgttgaaacgcattccctggataatgcccgcatagtccggggcaaagaaggcgttgaccttcacgcccagcttcttctccatatcctgtaaaaacggcgtccattgcggtttcaggttttgctgtgattccgttgaaataatgccgaaattcagcgccttttcctgctcttcggcgtgtgccgggcttaacagggtgctgaggctgaacatgctggtgaaggccagcgaggcaattatcttagcgttcattcgttttcctcaatgatggggatgtcaggcagctttcgcgttctcttcgacgcggttgatgctgcggtagagatggtcaaaacgttcgttatcaaactgttggctgctgccgtcgtagaagacgtgcccctggcgcagggcgacgatgcgttcgcagtagcgcagggcgtaatccacctgatgcagcgtgacgaccacggtgatgccgtcgttctggttgatgtcgcgcagggtgtccatcacgatgcgcgccgattccgggtccagcgaggcgatcggttcgtcagcgagaatcactttcgcctgctgcatcagcgcgcgggcaatcgccacacgctgctgctggccgccggagagcgtggaaacacgctgatacgcaaagtgcgccataccgacgcgggtcagcgcctgtaatgcgcgctgtttctgctcgcgggtgaaccaactaaaacaggtgcgccagaacggcgtgctgccgagcgcgccaatcagcacgttctccagtacgctcaggcgattcaccaggttgaattgttggaagatgtagccggtgttggcgcggcttttgcggatatcgcgggccaggcggccttcgcgctggacagtgcggcccagcagctcgatatggctaccggcggatttatcgccggtaatcaaaccgcttaagtgacgtaaaagggtggatttgccggaaccggacggcccaagcagagccaccatttcaccatgatggatattcagatcaaccgcgtgcagcgcctgatgctggttgaaggttttgctcagttgttcgacgcagataatcgtttgcatgatgcagcctccctaaaaaagtggctccatcgtggcggattattgtgacgatttggttaattaaaagtgactaacagatgaagagttaacgggaattcgatgacagtgcgggagggcgggcctcccggcggattattgcgttggttgttgtttgacgacattaatcatccacggtacgccaaatttatcggtgactttgccaaagccatgcgcccagaaagtttcctgccaggccatttcgatttttccgttagcggcaaggttatcaaaccagcgttttccttcttcgacctgttgcgaatcgagcaccagcgtaaaaccggagtagctggcttttcctgacggtatagcatcgctcatcatgatatcgcttccggcaatgcgcacattggcgtgggcgatggcggtatcgggaaattgcattccggaagggcagttctcggcgctgtcctgcgctgattttggcatttcgccgaagctgattttatagagcagttcagcgcccaacgtacgttgataataggcaatcgcgtcggagcagttaccggcaaaagagaggtagggacttaacggcatgatggtgacctcagttaagagaagccagttaagtgtagttcgaaatttatacagatgagagggaagcctgataagacgcgcgagcgtcgcatcaggcagtcggcactgttgccggatgcggnntaaacgcctnnnnnnnnnnnnnnnnnnnnnnnnnnnnnnnnnncctnntaagacgcgcgagnntcgcatcannnnnnnnnnnctgnngnnnnatgcggcgtaaacgccttatccggcttaccgatcacaatacaatcagttctttttcacaaactcagatttcagtttcatcggaccaaaaccgtcgattttgcaatcgatgttatggtcgccttcaaccaggcggatgtttttcactttggtgccaattttcagcatcgaagagctacctttcaccttcagatctttaatgatggtaacgctgtcgccgtcagccagcagattgccgttagcatctttaacgatcagctcgtcgctttcctgtgcaggttctgcgtcgttccattcgtaggcacattccgggcagatgtacatgccgttatcttcgtaagtgtattcggagttgcattttgggcagtgtggtaatgacatgtggatttcctcaaaagtcagcagggcaaaagcgccaaaaaacggcagattgccgaaaaaggccgcaattatacacaaaatccctgagtttgtcgggggtactgctgattttagacgacgatcgttttcatttgaaaggaaacgcaaaaagaaaataatctttttgcctccatttattatttaagataaggttaatgctctacttgttcttttttttattcacatgatatttttatctttctgacgttttaaacgtatcggaagatgttatttattctaataaaaaacaacactctaaatataaaattatttcttgcagtaattataaaagccgaaaacagaactcaaaaacaatctggctaaataaaagtaataaaatttgctttaaggaagaattttctatgtacacacagaccctgtatgagttaagtcaggaggctgaacggctgttacagctttctcgccaacagttgcagttactggaaaaaatgcctctctctgtacccggagacgatgcgccacaactggctttaccctggagtcagcctaatatcgccgagcgtcacgcgatgctgaataatgagttgcgtaaaatttcccgactggaaatggtgctggcgattgtcggtaccatgaaagcagggaaatcaaccaccattaatgccattgttggtacggaggtactgcctaatcgcaatcgcccaatgactgcgctgccgacgcttattcgccatacgcccggccaaaaggaaccggtactgcatttttcacatgtcgcgccaatcgattgtttaattcaaaaattacaacagcgcctgcgtgattgcgatattaagcatctgaccgatgtgctggaaatagataaagatatgcgtgcgcttatgcagcggatcgaaaatggcgtcgctttcgaaaaatattatctgggtgcccagcctatttttcattgtctgaaaagtttgaatgatttggtgcgactggcgaaggcgctggacgtcgattttcctttttctgcttacgccgccattgagcatattcccgtgattgaagtggagtttgtccatctggcggggctggaaagttatcccggtcaattgacgttactggatacccccgggccaaatgaagccgggcaaccgcatctgcaaaaaatgcttaaccagcagctggcacgcgcctcggcggtactggcggtgctggattatacgcaactgaaatcgatctccgatgaagaggtccgtgaggcgattttggcggtggggcaatcggtgccgctgtatgtgctggtcaataagttcgatcaacaggatcgtaacagtgacgacgccgaccaggtgcgggcactgatttccgggacgctgatgaaaggctgtattacgccacagcagatatttccggtgtcgtcgatgtggggctacctggcaaatcgggcgcgccatgagttagccaacaacggtaagttaccaccgccagagcaacaacgctgggtggaagattttgcccatgccgcgctcggcaggcgctggcgtcatgccgatctggcggacctcgaacatattcgtcatgctgccgatcagttgtgggaagattcgctgttcgcccagccaattcagatgttgcttcatgccgcttacgctaacgcctcgttgtatgctctgcgatctgccgcgcataaactgttgaattacgcgcagcaggcgcgggaatacctggattttcgtgcgcacgggttaaacgtcgcttgtgaacaattgcggcaaaatatccaccagatcgaagaaagtttgcagctattgcaactcaatcaggcgcaggtgagcggcgagattaaacatgaaatcgagctggccctgacctccgccaaccactttctgcgtcaacagcaagatgcgctgaaggtgcagttagccgccttgtttcaggatgattcggagccgttaagcgagattcgtacccgctgtgagacactgttacagacggcgcagaacaccatcagtcgcgactttacgctgcgttttgccgagcttgaatccaccctttgccgggtgttaaccgatgttattcgccccattgagcaacaagtcaaaatggaattgagcgagtcagggtttcgtcctgggtttcattttcctgtttttcacggcgtagttccccacttcaacactcgccagctgttcagtgaagtcatttcgcgccaggaagcaacggacgagcagagcacgcgattaggcgttgtgcgtgagactttttcgcgctggttgaatcagcctgactggggacggggaaatgagaaatccccgacagaaacggttgattacagtgtgttgcaacgagcattaagcgcagaagtcgatctttattgccaacaaatggctaaagttctggcagagcaggtcgatgaatctgttacggcaggcatgaatacttttttcgctgagttcgcttcatgtttgacggaattacagacgcgtttacgcgaaagtctggctctgcgtcaacaaaatgaatcggtggtcaggctgatgcaacagcaattgcagcagactgtgatgactcacggctggatttacaccgacgctcagctgttacgcgatgatattcaaacacttttcacggcagaacgatattgaccaagacgttactggacggccccggtcgcgtgctggagtcggtttatccccgctttttagtggatctggcgcagggcgatgatgcccgccttccacaagcccatcagcagcagtttcgtgaacgactgatgcaggaacttcttgcgcgcgtgcagcttcagacatggacgaacggcgggatgttaaatgcgccgcttagtctgcgtctgacattggtggaaaaactggcgtcgatgctggatcccggtcatctggcactgacgcagatcgcgcagcatctggcgctgctgcaaaaaatggatcaccgccagcactctgctttcccggagctcccccagcaaattgccgccttgtatgagtggttttcagcccgttgtcgctggaaggaaaaggcgttaacgcaacgaggcctactggtgcaggcgggtgaacagagcgagcaaatttttacccgctggcgtgctggggcgtataacgcctggtcgttgcctgggcgctgttttatcgttctcgaagagttgcgttggggggcatttggcgatgcctgtcgtctgggaagcccgcaagcggtggcgttgttgctgggtgatttgcgcgtgaaagcgacacaacatctggcagagagtatcaatgcggccccgaccacgcgtcactattaccatcagtggtttgcctcttcgaccgttccgacgggcggggatcatgctgattttttaagttggctgggaaagtggaccacggcagataaacaacccgtttgctggtcagtgacccaacgctggcaaactgtcgcgctggggatgccacgactctgttcagcgcagcgtctggcgggggcaatgctcgaggaaatcttctctgtaaatttggtgtaaataatcagttacatcaatgagtcctaaacgaaatccatgtgtgaagttgatcacaaatttaaacgctggtagggtaaaaaggtcattaactgcccaattcaggcgtcaactggtttgattgtacattccttaaccggagggtgtaagcaaacccgctacgcttgttacagagattgcatcctgcaattcccgctccccttttgcggccgtcgcgctgatttttctggcgtttgcggaaatgggccaactctgcgaggaaagctatgctgaaaaggaaaaaagtaaaaccgattacccttcgtgatgtcaccattattgatgacggtaaactgcgtaaagccattaccgcagcatcactgggtaatgcaatggaatggtttgattttggtgtttatggttttgttgcttacgcattaggtaaagtttttttcccgggggctgaccccagcgtgcagatggttgctgcacttgccactttctccgttccctttctgattcgaccgcttggcggactcttctttggtatgttgggcgataaatatggtcgccagaagatcctcgctatcactattgtgattatgtcgatcagtacgttctgtattggcttaataccgtcctacgacacgattggtatttgggcaccgattctgctgttgatctgtaagatggcacaaggtttctcggtcggcggtgaatataccggggcgtcgatatttgttgcggaatactcccctgaccgtaaacgtggctttatgggcagctggctggacttcggttctattgccgggtttgtgctgggtgcgggcgtggtggtgttaatttcgaccattgtcggcgaagcgaacttcctcgactggggctggcgtattccgttctttattgctctgccgttagggattatcgggctttacctgcgccatgcgctggaagaaactccggcgttccagcagcatgttgataaactggaacagggcgaccgcgaaggtttgcaggatggcccgaaagtctcgtttaaagagattgccactaaatactggcgcagcctgttgacatgtattggtctggtaattgccaccaacgtgacttactacatgttgctgacctatatgccgagttatttgtcgcataacctgcattactccgaagaccacggggtgctgattattatcgccattatgatcggtatgctgtttgtccagccggtgatgggcttgctgagtgaccgttttggccgtcgtccgtttgtgctacttggtagtgttgcactgtttgtgttggcgatcccggcgtttattctgattaacagtaacgtcatcggcctgatttttgccgggttactgatgctggcggtgatccttaactgctttacgggcgttatggcttctaccttgccagcgatgttcccgacgcatatccgttacagcgcgctngcggcggcatttaatatttcggtgctggttgccggtctgacgccaacactggcggcctggctggtcgaaagctcgcagaatctgatgatgccagcctattacctgatggtagtggcggtggttggtttaatcaccggcgtaaccatgaaagagacggcaaatcgtccgttgaaaggtgcaacaccggcggcgtcagatatacaggaagcgaaggaaattctcgtcgagcattacgataatatcgagcagaaaatcgatgatattgaccacgagattgccgatttgcaggcgaaacgtacccgcctggtgcagcaacatccgcgaattgatgaataagctgaaacggatggcctgatgtaacgctgtcttatcaggccaattgaactcttaaggttcacttaatctctgacgcgcatactctcctccaggttaacggaggagagtgcaatgaaaaaccgtgtttatgaaagtttaactaccgtgttcagcgtgctggtggtcagcagctttctttatatctggtttgccacgttctgatctttcttcagccgtacccaggcccgcgtgccggaagtctcttgccggttttgcaggaaaaactgcccgtgatgcaactgtgtaatgcggctgacaatacttaaccccagaccaatcccgccataacggctgtccatacgtacaaacgctttactcaactccccgcatttactctcatcaatacccggtccttcatcttcaacggccatgaccgctccgccatcttcttgcagcttaatcataatgttgctgccttgcgggctgtaacgatgggcgttttctaccaggtttcgcaataacatccgcagcagggttgcatcaccctgaacggtgatgtcggcggcgctctctggcaatagcagggtttgctgtcgctggtcgagcatggtactgagttcgtcatacgaggggagaatgacatcttccagcagttttacatgttgataattaccggaagaaaatgactgtccggcacgcgccagttgcagcagctgggagacgctctccatcatctgatcaagccgtgccactaacggtgctacatcaatgtgatgcgttttcgccagcagttccagatgcaaacgcacccccgccagtggcgttcgcagttcgtgcgcgacgtcagcggtaaataacctttcgttatccagcgtgctggtcaggcgactgaccagatcgttcaacgccgaaaccaccgcttcgatttcgagggtggcgctgtgaatggcaatgggcgttaagttgtcggcggtgcgcgcttccagctctttttgcagctccgccagcgggcgggtgatgcggcgtaccgcctgatagcagataaatagcgtcaggctgaccataaagacgccggggacaatcaggctggcgaccgcctcgcggatctcacgcatgatgtggcgatcgttgttgcgattgtcgcgtagcgcctgctcaaacagctgaatctgctcggtactttcatgccatagccagaagacgctgatcagctcaaacaccaacaaaatggccccgatggtcaatatcagccgttggcgcagcgatattggtcggcgcagaaaacgcatcagattcaattagttttcctcattcgcgacaagcatatagccaaagccgcgcacggtgcggatacgggctttgcccactttgtcgcgcagattgtggatatgcacttccagggtgttggtcgagggttcattgtcccagttatagatgtcgttgtagagaatttcccgatgcaccggactgcctgctttgagcattaaccgtgacagcagagcatattctttgggcgtcagaatcaactcttcaccgcccatccatacctgacggcgacccatgttcagcgtcagattgccaacaatcagctcactttcgccctgattattatggcgtcgtagcagggcgcggatacgggcatgtaactcttccagcgcaaaaggcttcaccagatagtcgtcggcaccgacatccagcccggcgattttgtcggtcagcgtatcgcgagcggtgaggatcagtaccggcagggtatattttttctgccggatacgggcgagaaaatgcagtccatcttcgtcgggtaaccctaaatccagtaccaccaggctgtaatgacctgcctcaaggctttgttccgccatccgcgcggttgtcacgccatcgcacgcgtagccttcggtttgcgccgccagaatcagtccctgcaataacagcgtatcgtcttcaacaatcagaattttcattcactcactctcctgcaagtttgcagaatatcatccgcagcctggtaatacttcgtctcaacgccagttaatcccaatagcgtggagaataaattgtcttgtgaatagtgttgcgtttgcgcctgtttttgcaggcagttctggtcaacctgataccgtttttgataatcctccgacagccacagcagcatcggcacctgtttttggctatccggggcgatggcataaggcagaccgtgcagatagatgccattttcacctaacgattcaccgtggtcagaaagataaaccaggctggtggtaaatttatcctgatgttctttcagcagattaatcgctttatcaacaatatagtcgacgtaaaccagcgtgttgtcgtaagtgttcaccagttgctctttggtacaggtctggatctcattggtgtcgcaggttggggtaaatttcctgaactgcggcggatagcggttgtaataggtcggaccgtggctgccgatggtgtgtaagacaatcacgccatcaccctgcagattattgatgtactcttccagcccgtggaacagcacttcgtcatagcattcgccgttgatgcactgatcaggcagattcagcgcggtgacgttctggtgaggcacgcggtcgcaggcacctttacagccgccatcgttgtcattccacagcacgttgatgcccgctcgctgaatgatatccagcacgccttcctggtgctgtgccagctcttctttgtagtgctctcgcggcatatccgagaacatgcacggtactgaaactgccgttgccgtgccgcaagatgcggtatgagggaaatagaccacgttatctttcgccaaccgcgggttagtttcacgcgggtagccgttgagggagaagttctccgcccgcgaggtttcgccgacaatcaggatggtcaaatttttacgtttttcgttctgcattaatgggttgcggtgcgcgtcttcaccaattcgcaccagcggcagatttgccagtcgctgatgggagtaccatgaccagctggcaacaatgctgttagaggggcttaaggacttcaccagctctttgttgttgcggaacaacgaggcgtagtctttataaaatagtgcggcgaccagcaaaatcagcagtacagaaaccagaatattggctccacggaaaagaacactgcgcagacgcgaggtggcaggtttgattttaatccagcaggcaatcagcgcagcaagcacgccgctgaatcccagcgttaataacatttgcggtgtcatcagcgcatagctttctgccggagtggtatcaataatattggcaatcatcgagcggtcgatgacgatgccgtaagtcattatgaaatattgtgcagccgcgccaaccagaataaacaggcaggccagcggtcgattaagccataagaaagagcttagtgtcaggacaatattaatcacgctgaaggcgacgaccggcatcgacaagaaaaccagtacgttatgcagcgagtccagcggcagcgcctgcaacacctgtttaaaaaaggcaatattcaggcagatagagatataaaaagcggccaacaatagccaggcgagtaaattcaaagagggtctttttagtaggcgcttcaacatcacggtgtttccatcgaacaaagtgcgcatatgctcgcaaagcaaaattaagccaaccttaagttcttaagattggcttttatctttgctggattaaggggaattaatctttgcttattggtgcatctaagggatacgggtttttatgcagccggttgtaattcagcgcatacatggcggtgatgaccatcagggtgacaaatgaccacataacctctttcgccccggaccccaccacggcccagatgcagtagaggaaggcaatggtagtaaccgccagatatgccgggcgtgctttaccaaagtgaccgtgtccgagcagcagtaacgccgcacaggtgtaaagatatggcaccagtgtaaagatgaccgacacggaagaaaccagaccgaattctttggtcgcgtttggtgaaatgctgctgagctggaagatggtcatcaaaataccgacgataatcagccccgccactggcgtacccgctttatttacacgggcaaaaatcggtgggaacagtccgtcatcggcagccgctttcgccgtttgacccgccagcaatgtccagccgcccagtgaacctaagcaacccgcagctgcgcagaaggaaacgatggccccggcggtgtcacccaacgccatccgtgcggcatcaccgaatggcgaggcagaaacgcgcagtgcggcattagggatcatccccataatcgcggtggtggagagcacatagcaaacggcggcaatcaataccccaccaatggtggctatagggacgttgcgtttcgggtttttcaccacacctgcggcaacggaggcactttccacaccgatgaacgaccacagcgtaacgttaagggtactttgaattgcaccgaaggtgcccaggccgctgacgttccatgccgccatataggtttcaccacgaaaccagaaccagccaaatacggcaatcccgacgatggggatcagcgccagcacggtggcaacggcctgcacacgggtgatcattttcggaccgacaatgttcagcaggacgaagatccacagcaccacgacgcaggtgatggttaataccaatggatctttcagaatcgggaagaagtaacttaaatatcctacgccaatgaccaccatggcgatattgccgatccagcaggccagccagtagaggacgttggtttgataaccgagaaacgggccaaagcagcggcgggcgtaagcgtaagaaccaccaggacttgggtcgaggaacgacattttggcgtataccatcgagagccccagcgcaccgataatcgtcaccaaccatccataaatggcaatcccgccggtggaggccaggtttgcaggtaacagaaaaacacctgaccccataatattccccgacaccatcagggtgacggggattaagcccactttgtgagcatcagcatccgaagacataattaaactcctgcgaaggcgagcttcgtgacaataaattacgtcatatcatacgcctgcattcgatagttgaattattatcgaccgggttatcgctgatgccgttattaatatagctcttcgttaaggttaaaaatcaggcgacagtgcgttctctgtgctgactaacataatgcagcggcgtcataccgtagaagtctttaaagacagaaataaagtacgacgtactgttgtagccgcaggactgtgatacctgagagatatttttaccgtccatcattaattcatttacggcataacgcatgcggcaggtggtgattatttggctataactggtgttttcgcttttcagctttttctttaacagacttgggctaagacataaacaactggctaccatactaagattccagtctttgtgaatatcgctttcaataatttgataaacgctgtcacttacacaattacgtaacatatacatcattaatgaaaggaattttttactgtcgagaaaacgggatagcaccgtgaataataatgcgcgtgttcgttccttttctgactcagtttctgcgggcatcatgctgtgttgcgcggcaacgcgaaagacgtctggtgtcaggcatggcagggtgagaatgggcgtagcgctacgttgccatactggtatttgcgagagatctttattcagaaaccggaggtaatctttgatgatgtcgtgactaatatgagcaaccaaagtgttgttaagagaggagacgtcgataatattattttcacaatttaataacgccatatggttagctttaaggctaataggttctttcccattcacccttatccagacatctttttcagtcaataaaacaatacaaggttggtcgctgcaaatcctcatacatgtactcctgagtgcgaataaaagaccagttctcgctaaagcaaagcgataccgggaaatggttatataattgtatgatgaatataaacatgcataaaaataacgagttttactaatattacaaatttnnnnnnnnnnttctcatgtacatatttttttacagggtaaataacaggcaaaaaaaagcgcggggtggggccgcgcaaaaagtatgacatttttgtttgcagcaatntttntgaaaacgttgccatactcaaaaggcctaaggccaggcggcgtaatgttatttaaacaattacgccttcagcggaatagtggttacgctttcacacacataacgtggtaaataccgtcaataatttcagtcccttcagtttcgtgttcaaatccagggaaatgatggtcccaggattgcagcgagcgtaaataacttacttgcggactgtttttatcgccgaagttttcaccagacagcagcatcgggattcctggcggatacgggataactgagtttgccgcgatacgtcctggcagattttcaatggataccagttcgacattgttgtcgacaatcgcgttgtacgcttcacgcggggtgatttccgccaccggcaggccggaataggcttcgttcaaccgtgcgccagggttgttttctttcagccaggcaaacatggtgtcacccagatcgtgaatccccatgttcgcgtaagtgtcaggatattgttcaacaagttccggcatcacctgcgccagcggtgtgttggcgtcatagtggcgtttgaaggagcaaagggtgttaaccagagtcccccatttcccacgggttacgcccatagagaacaggaacataatttggaagtcagtggtgcgggtaggcacaatgccgtggcgaccaagccaggcagtgaccagcgccgccggaacaccggtttcttccagttcaccatcttcacccattcccggagcaaggatgctgactttaatcgggtcgagcatactccagttatccggaatatctttgaagccgtgccagctttcgcccggatgcattacccagcagtcctgaacggtggtcagcagtttggttggtgcgtcagcaaagtcataggttttgccggtttgtgggtcggtgacgacttctttgttccacggtttgaagaaccagctaccgtcagcggcgaactctttatacagccgcgccatcgcctgacggaaatcaaccgcttcgtcgatcacttcctgcgtcagtgacaggccgctgttgccgtccatcatcgacaccgccacgtcgttggatgcgcagatggcatacagcggggaggtggtggcatgcatcatgtaggcctggttgaagcgggagaagttaatcgccccacgaccttcacgtacatgaatataagaggcctgtgaaagcgcattcagcagtttgtgggtggagtgggtggcgaaaacggtaggaccgttgtgatcgccaggttcgccgcgcatggcatagtgatcggcatagatcgggttgaaacgtgcatagccgtaccaggcttcgtcaaagtgcagacgatcggaggttttttccagcagatcctgcgcttctttagcgttataacacacgccgtcataggtgcagttggtcaccacgcagtaagacggtttttgcccggctttgtctttagtcagcgggctttcactgattttcttctgcaaggtttcaggttgcatttcctgcggatagattggcccgataatgccgtagcggttgcggcttggcaccatgtagaccggtttcgcgcctgtcagcatcaaaccttgttcgatggatttatggcagttacggtcaacgaccacgacatcgttatcggtcatgcaagcctgcatgatggtgcggttagagccggaagtnccgacgactaccgaccaggagcgatcggcaccaaatacgcgtgcggcatatttttcgctttcgccaaatgcgccagtatggtcaagcaaagaaccgagggaagttcgttcgatgcccatgtcggtgcggaacagattttcaccgtagtagtcatggtagaaacgtccggcgggtgttttggtaaaaccaacgccgccctggtggcctggcgctgcccaggaatattcatggatgtcgctatatttcatcagcgcgctgaacagtggcggcaacagctgctggcggtagcgggtcatcgcggcaacggcgcgtccggcgataaagtcggcggtatcttccagaatccaggcgaattcatcgacaagctccagcagatcccggtccattgcggcgagggctttttcccgatcgcccaacaggaagaccggcacgttttgttggcnctcatgaagcttaccgatcaattgtctgacgttttgatgttcgtccggatgttccatttgatagctgaacatcaggcagtcaatggcttcgtttgaagagagaatggcaaaaccatcatcaaaggaggtggatttaatcacggtaacattttgctggcttaaagcatctgccagacgctcaacagcgttaccgacccaggtgtcttgatggagaaactcgctttcaacaattaatactttcatcattgcttacccggttatgaaggaatcttcgttgcgggcaagtatcttccggccttttcgggctgtaaagcgcgtgaaaaacaaacatttttgaaatatttgtnnnnntaaacaatatgttatgtgattattttaaattattttcactgcttattatcgacggctaaactatttttttggctgatactgatatcgtctttagccgggaaacgtctggcggcgctgttggctaagtttgcggtattgttgcggcgacatgccgacatatttgccgaacgtgctgtaaaaacgantacttgaacgaaagcctgccgtcagggcaatatcgagaatacttttatcggtatcgctcagtaacgcgcgaacgtggttgatgcgcatcgcggtaatgtactgtttcatcgtcaattgcatgacccgctggaatatccccattgcatagttggcgttaagtttgacgtgctcagccacatcgttgatggtcagcgcctggtcatagttttcggcaataaagcccagcatctggctaacataaaattgcgcatggcgcgagacgctgtttttgtgtgtgcgcgaggttttattgaccagaatcggttcccagccagagaggctaaatcgcttgagcatcaggccaatttcatcaatggcgagctggcgaatttgctcattcggactgtttaattcctgctgccagcggcgcacttcaaacgggctaagttgctgtgtagcaagtgatttgatcaccatgccgtgagtgacgtggttaatcaggtctttatccagcggccaggagagaaacagatgcatcggcagattaaaaatcgccatgctctgacaggttccggtatctgttagttggtgcggtatacaggcccagaacagcgtgatatgtccctgattgatattcactttttcattgttgatcaggtattccacatcgccatcgaaaggcacattcacttcgacctgaccatgccagtggctggtgggcatgatatgcggtgcgcgaaactcaatctccatccgctggtattccgaatacagcgacagcgggctgcgggtctgtttttcgtcgctgctgcacataaacgtatctgtattcatggatggctctctttcctggaatatcagaattatggcaggagtgagggaggatgactgcgagtgggagcacggttttcaccctcttcccagaggggcgaggggagtgtccgagcatcatgaggccgaaaactctgcttttcaggtaaattattcccataaactcagatttactgctgcttcacgcaggatctgagtttatgggaatgctcaacctggaagccggaggttttctgcagattcgcctgccatgatgaagttattcaagcaagccaggagatctgcatgatgtctgcacccaaaattacatttatcggcgctggttcgacgattttcgttaaaaatattcttggtgatgtgttccatcgcgaggcgctgaaaacggcgcatattgccctgatggacattgaccccacccgcctggaagagtcgcatattgtggtgcgtaagctgatggattcagcaggggccagcggcaaaatcacctgccacacccaacagaaagaagccttacaggatgccgattttgtcgtggtggcatttcagattggcggttatgcaccttgcacggtgactgatttcgaggtctgtaagcggtatggtctggaacaaaccattgccgatacgttggggccgggcggtattatgcgcgcgctacgtaccattccgcatctgtggcaaatttgcgaggacataacggaagtctgccccgatgccaccatgntcaactatgttaacccaatggcgatgaatacctgggcgatgtatgcccgctatccgcatatcaaacaggtcgggctgtgccattcggtgcagggaacggcggaagagctggcgcgtgacctcaatatcgacccggctacgctgcgttaccgttgcgcaggtatcaaccatatggcgttttacctggagctggagcgcaaaaccgccgacggcagttacgtgaatctctacccggaactgctggcggcttatgacgcagggcaggcaccgaagccgaatattcacggcaatactcgctgccagaatattgtgcgctatgaaatgttcaaaaagctgggctatttcgtcacggaatcgtcagaacattttgctgagtacacaccgtggtttattaagccaggtcgtgaggatttgattgagcgttataaagtaccgctggatgagtacccgaaacgctgcgtcgagcagctggcgaactggcataaagagctggaggagtataaaaacgcctcccggattgatattaaaccgtcacgggaatatgccagcacaatcatgaacgctatctggacgggcgagccgagtgtgatttacggcaacgtccgtaacgatggtttgattgataacctgccacaaggatgttgcgtggaagtggcctgtctggttgatgctaatggcattcagccgaccaaagtcggtacgctaccttcgcatctggccgccctgatgcaaaccaacatcaacgtacagacgctgctgaccgaagctattcttacggaaaatcgcgaccgtgtttaccacgctgcgatgatggacccgcatactgccgccgtgctgggcattgacgaaatatatgctcttgttgacgacctgattgccgcccacggcgactggctgccaggctggttgcaccgttaaaacgcgactaaacgctactgcgccgggggatttattccggcgcacacntctgacgataccaataacagaaggcgggcgttggtaacagcgacccgataccctatgagcatttcaatgactacaaaactcagttatggatttggagcgttcgggaaggattttgcgatcggcattgtgtatatgtacctcatgtattactacaccgatgtcgtcgggctgtctgtgggtttggtcggtactttgtttctggtggcgaggatctgggatgctattaacgatccgattatgggatggattgtnaatgctacgcgatcgcgatggggtaagttcaaaccctggatcctgatcggtacgttggcaaactctgtaatcttatttctcctctttagtgcgcatctgtttgaaggtactactcagattgcctttgtttgcgtgacctacatcctctggggcatgacttacaccattatggatattcccttctggtcgctggttccaaccatcacgctcgataaacgtgagcgtgaacaactggttccttatccgcgtttttttgccagtctggcgggctttgttacggcaggtgtgacgctaccatttgttaattatgtcggcggtggcgatcggggatttggctttcagatgttcacactggtactgatcgccttttttattgtttcaaccatcatcactctgcgcaatgtgcatgaagtcttttcgtcagacaatcaaccgtctgctgaaggaagccatctgacacttaaagccatcgttgcgcttatttataaaaacgatcagctttcatgcctcttgggtatggctcttgcttataatgtagccagcaacattattaccggctttgctatctattatttctcatatgttatcggtgatgcggatttgttcccctattatctgtcgtatgcgggagctgctaacctggtgacgttagtattcttcccacgcttagttaaatcattatcccgacgcattttatgggccggagcatctattcttccggtgttaagctgtggtgttctcctgttaatggcattaatgagctatcacaacgtcgtcctcattgtgattgcgggtattttgctgaatgtgggaacggcgcttttctgggtattacaggtcatcatggtggcagataccgttgattacggtgaatataaactgcacgtacgctgtgaaagcatcgcttactccgtgcagactatggtggtgaagggcggttcagcctttgcggcttttttcattgcggttgtgttagggatgattggctatgtaccgaatgttgaacagtctacgcaagccctattaggtatgcagtttattatgattgctctaccgactctgtttttcatggtaacgctgattctctacttccgtttctatcgcctcaatggcgacacgctgcgcaggatccagattcatctgctggataaatatcgcaaaataccgcccgagcctgttcatgctgatattccggtcggtgcagtgagtgatgtgaaagcctgacgtggacaatagctaacgaaaatggcctgatgcgatatgtttatcaggccacgtcttaatggaatgctttggatttgcaaattttgtagaccggataaggaattcacgccgcatccggcatcaacaaagtgcacgttgttatccggttatcaagccaaagcgccgtagctgacggcaatgaaagcgagcgaggaatatcaccgtggttaatgcgccaagcagcgcgcagaacatatcggattgcgtgtcccactggtcgccctgggtgccgagaaaatcatccgctccctggcccattgccagcgccgcccaccactcgattaattcatacatcgcgcttatcgccagcgccacgcaacagaccagaaacgccaccattttacgtccgcgaacgtacatcccgcgcacaaggatctctcgtgccaccagtgcaggcaccagcccctggaaaaaatgccccagcttgtcatacggattacggctcaaccccagccattcctgcacctcaaaaccgatggggactttcgcgtaggtgtattgcccgccgaccatcaggatgatggcgtgaaagaaaatgagcgtatagagcagcggcgttaacggataacgtttagcggtggcaagcagtagcggcacgacaataatcaccggtgtcacttccatcagccaggtgagtttgtcatgggccgaaatgccggtataaatcaggattaacgttagcgccagtgcgccggtgttaagaattaacggcttgagtgtgcgggtcatggtgagttcgcaagtcagggaaaatactgactattcaccagcaagcgtgaaattacaatcgcaaaagaggtggcccagggggatcacctggcagcatgctgccaggcgctgggccgaagaggttacttagtgcagttcgcgcactgtttgttgacgatttgctggaagaagtcgttacctttgtcatcgaccaggataaacgccgggaaatcttctacttcgattttccagatagcttccatacccagctccggataagcgacgcattccagatgcttgatgctctgctgcgccagtaccgccgccggaccgccgatgctaccgaggtagaagccgccgtgtttatgacacgcgtcggtaacctgctgactgcggttacctttcgctagcatgatcatgctgccgccgtgggattgcagcagatccacataggagtccatacgacctgcggtggttgggccaagtgagcctgatggataaccggcaggggttttcgccggacccgcgtagtagatcgggtgatctttgatgtactgcggaagttctttaccggcgtcaatcagctctttcagcttggcgtgtgcaatatctcggcccacgataatggtgccggtgagcgacaaacgagtggaaaccggatattgcgaaagctgggcgaggatctctttcatcgggcggttaaggtcgaccttcaccgcttcgccttcaccggcctggcgcagttcttgtggaatgtactgacctggatggtgttccagtttttcgatccagatacnttcgcggttgattttcgctttaatgttacggtcagcggagcaggagacgcccatgcctaccgggcaggatgcgccgtgacgtggcagacggataacgcgaatgtcgtgcgcgaagtatttaccgccaaactgcgcgccaagaccgagtttctgggcctcttccagcagttcctgttccagctggacatcgcggaacgcctgaccatgttcgttcccttccgtcggcagttcatcgtaatagtgagcgcttgctaacttaacggttttcaggttggtttccgcagacgtaccgccaatcacaaacgcgatatggtacggcgggcaggctgcagtaccgagggtacgcattttctcgacgaggaagtttttcagtttgccgggagtcagcagggctttggtttcctggtagagataggttttgttggcagagccgccgcctttcgcaacgcaaaggaatttgtactcatcgccatctaccgcgtacaggtcgatttgcgcaggcaggttagtgccggtgttgatctctttgtacatgtccagcgccgcgttttgcgagtagngcaggttatcttcgatataggtgttatagacgcctttcgacagcgcttcttcatcaccgccaccggtccacacgcgctggccttttttaccgacgatgatcgcggtgccggtatcctggcaggtcggcagcacgcctttggcggcgatttcggagtttcttaagaattgcagtgccacgtacttgtcgttttcgctggcttctggatcgtgaagaatagccgcaacctgtttctggtgtgccggacggagcatgaaagaagcgtcgtggaaggcttgctgcgccagcagggtcagggcttctggttccactttcaggatggtttcgccgtcgaagtcggcaacgctaacgtaatcggaagtgagtagatagtattcggtattgtctttccccatcgggaaaggtgcctggtagataaagggtttgtttgacatagcttccagcctgtaactctgtatttgttattcgaaaatggcgtgccgcgtagtaacgggcggcacgcaaagtgcatttataagaacccgtacatcgcggcgaagatccagccgaagacgcacgatacgctcacaccaatcaaccccggcagaataaagctgtggttgatgacgaagcgaccgatgtgggtggtgccggaacggtcaaactgaatcgctgccagatcgctcggataagtcggcaggatgtaataaccgtagcaagccggtgctgaagccacgatgtatgccggatcaacgccgatcgctagcgcgaccggaacaatcgccgccagcgccgcagcctgagagtttacaaacttggaaaccagcagcagaacaatggcataggcccacggatactctttcaccatttcacccagtacgccctgaatttcagacatatgcgcaccgaacatggtttctgccatccatgcgataccgtacaccgccacgatggcgatcataccggaacggaagacttcgttttttgagatagacgcgggattggttttggtcaggataataatcagcgccccggtcagcagcataaacatctgaataaccagtaccatcgacagcggtttgccgccgaaggatggacgcaggtccgaatcagcaccaagaagtgcgactacagcgattgccccgaggaaaatccacattgccagccagttgcttttcggcagttttttatccagcagcgtcgcggtatcaccgtaaacatactcacggttttccggtacggagatgaatttctggaactcttcgtctttatccagatctttaccgcggaaccagctgaagataccgatcgccaggataccgattaacgtcgatggaatggtgattgccagcaggtcgaggaactcaagatggcgaccatcaaaggtgacattacccagcattgcaaccagagacacgaccgcaaccgacaccggactggcgataatccccatctgtgcaccgatagaacttgccgccatcggacgttccggacggatgttgttcttaatggcgacgtcgtagatgatcggcagaatggtgtaaaccacatgacccgtaccgcaaagaatggtcagcgtacaggtcacaaacggcgcgacaattgagacatatttcgggttgcggcgcagcagcttctcggcaatttgcagcatgacatcaagaccgcccgaagcttgcaaggtcgccgatgccgccaccaccgcaatgataaccagcatgacatcaactggtggtttacctggctgaaggtggaagacgaagaccagaatgaccagaccgataccgcctaataaacccagcgcgataccaccctttctggcaccataaaacagacatatcagtattatgataagttggatagtaaataacatgtgtgaaccctcgcgataatcctatttaaatttttgctgaatagatcacagtcacgttctgttttgtatgaactgttttcagagcctgactaaatatccgtttggtcgttaccggctttagcaaatacctcacagtgaatattggctgattaaagcagcggcaaatttatgcactgtgataagcggctttttcagagagaaaaactctctggcgatgggtttaaagtttgtactgcgcagatgttaatgttttgtttgctgttatcttattgatatttatcggtctattttttgttctcagggcagatatcattaggtttatagattaatctgatctacccatttgtgggtaaaaatacacataatgcgggtgacataatagttaattaacttttgttagcgttttgaaattaaaaacaccgttcacctgaagagatattaatttttagcgatgatggagggataattatatttgatctggcacaagttttactgatgaaggatgtaacttgtgccaggggtattttgcattacggtaataattattacttacagataaccagcgatccgttattggcaatattgtttcagtagtgagtagtgttctgcctgaatacggtaacggtaaactggacgccccgtgacgccataatggatactggtgaacaagatgtggcagttgaccagccagataaggtatttacggcaggaaacacgcgaaatgttaacctcgttggctagctcgtcggttgaaaactcatagtcctgatgcgcgtcaatccactggcacagtgtgcgtaacgtctgcggcgttaagccttttggcaagcgacgaggatcctgctcgttggagctgctgccgtggattagctgatcaagctcggcctggtcataatactgatgtttttccagcgccattttcttttgccgccagccggtgagcgcctcttcaaagcgggaagcctggaagggtttgatcaggtaatccacgacaccgtaatgcagcgaatctttaatggttgccgcatcggctgcggaggagatgacaatcacatcacttttgcaacgcgcgttatgcaggacaggcagtaaatcgagcccgttctctttttgcatatagatatcgagcaatatcaggtcgataggcgtatcgctattgaagataatctctttggctttctccagcgtcgaggctgttccacagcattgaaagcctgggatttgtgctacgtatcggcgattcagctccgcgaccattgcgtcgtcatcgataattaatacattgatcatctgttcgacctctccccgtcccagggtatctggacaaaaaattgtgtgaaaatcccgggttccgattccacggcgatgctgccgccgagattttctacctgttgtttgacaagtgctaaaccgacgcctcgctcgcttccttttgtcgagacacctttgtcaaaaatgtgatcgattttgtcgggtgcgatccccggtccatcatcgttaacttcgcagtgcagccagccgtgacggtagtgcaatgttacgctaatttcgccaccgggttccggccctaatgcttccagcgcgttttctatcagatttcccaatgtggtaatcagcgtcgcgacctggtcctcactgccgctgtctggcagctggctttcactgtttaaaatcagcgtatggcctaaatcggtcgcgcggttaatcttgctgattaaaaaaccagcgataaccggagatttgatcttacccagcagagagccaatctcttcctgatagttattggctgttttgagaatgtaatcttccaactgcttataactcttcagatgcaataatccgagaatcacatgcaatttattcataaattcgtgggatcgttcacgaagtgcatcagcatagttgaccagaccgtcgagtcgctgcatcagtttacgaacttcagttttgtccctgaaggttgaaatggcaccgatgataacgccattactgcgcaccggaacggtgttgatcagtaatagccggtctttaatcgtaatctcttcgtcgcggcgcggcgtaccgtcgcgtaacacttccgagacatctaccacctgtgaccatgagtggctgagcgtcgacagtttctcatcgtcctgcgacttacggtaattcagcaattcttgtgcggcatcgttgatcagcgtgacctcgccgcgatcgtccacggcaacgacgccttctttgatagactgcaacatggcctggcgttgctcaaacagcgtggagatttcgtagggttccaggccgaaaaggatttttttcagtaccttaaccagaatgcaggtgccaatcagtccgaccagcatgccaaataataccgaccagataatgctccagcgactgtcattgatctgttgggtcacgcggcttaactcaaggccgatcgccaccacgccaatttgtttatgattttcatcgtagatgggggtaaatacgcgtaaagcctgcgccagaaaaccgcgattgatagcgacattttcttcgccattcagcgctttaaggatgtcatcacctttaaatggctgaccaatacgctgggcttcaggatgcgagtagcgaagactttgcatatcggtaacgacaataaacagcagatcgttgcgtttgcgcacggcttccgcgatggcctggatgccgctctcctgcggttttttctgcaagccctgacggatttccggcgagtcggcgagagtacgcgccactgccagtgccttgttggctagcccgtctcgcgtcatatcactgatttgcgagaagtaaatcagatgcaccaccaatagcaccgagaacagtaccgcgctgaccattaagatcactgtggtactcaatttcatcggacgtttgcgtaacatgcggtagggcaatgaatgtctcatcagcttccttgtgtgacaaatttcttaagcattatctctgatgaggcgggtaattcaaagggagtaagaatgattggctatataggggaagagactctggcaacggaaactgccagtgctgtatgaagattccagggctatgcttatagtgaaaaccatactgatgagagagggaaggtcatggatcaggcgctactggacgggggttatcgctgttataccggcgaaaagatcgatgtctatttcaacactgcgatatgtcagcattctggcaattgcgtacgtggcaacggcaagttatttaatctcaaacgaaagccgtggatcatgccggatgaagtcgacgttgccactgtggttaaagtgattgatacgtgcccgagtggtgcgctgaaataccgtcataaataagcgagggtaaaatggaaatacgcgaaggccacaataaattttacattaatgacgaacaaggcaagcaaatcgctgaaattgtctttgtgccgaccggagagaatttagcgattatcgaacataccgatgtcgatgaaagactgaaagggcaagggattggtaaacagctggttgcgaaagtcgtggaaaaaatgcgtcgggaaaaacgaaaaattatcccattatgtccatttgcgaaacacgaatttgataaaacgcgggagtatgatgatattcgcagttgatggaagagtacagattcacgatatttttcatgctctccgcggtgtgatgcaggagagcatctgaagggtagggggatgcacaaagaatgggcagagagcgcgtttttttgtcccaagtcatcccctttactgagcaaaaaaaagaatatctcctatatgagaatcatcaatcggggttaataaattttgcgtccccagagtgttcaatatttataggagtcatattatggaaggtaaaaacaagttcaatacttatgttgtttcttttgattatccatcatcttattcctcagtgttcttaaggttaagatcattgatgtatgatatgaatttctcttctatcgtggctgatgaatatgggataccacgacaattgaatgaaaattccttcgcaataacgacatcgttagccgcaagtgaaatcgaagatttaatcaggcttaaatgcttagacttaccagatattgactttgacctcaacattatgacagttgatgactatttccgtcagttttacaagtagccaggaaggataagaagaacataaaaaatggcactattctctaaaatattaatnnnntatgtgattggtgtgaacatatcctttgtcattatctggtttatctcacatgagaaaacacatattcgtttacttagtgcattcctggtcggaataacctggccaatgagtctgcctgtggcattacttttttctctcttttaggagctgtagttgagtggacccgctggttatcgtgaaacgaagcgtctctcctcaaaactggatttgcggaacgatgaacgaagcagtcgcctgactgcttcgttcattaaagtgaaatttatttctgtgggcgcatcgccgggaagagaataacgtcgcgaatagtatggctgttagtaaacagcataatcattcggtcgataccaatacccagaccagcggttggcggcagaccatattccagcgcagtcacgtaatcttcgtcatagaacatggcttcgtcgtcacctgcggctttagcgttaacctgttcctggaaacgttcagcctgatcttctgcgtcgtttaattcgctaaaaccattaccgatttcacgaccaccgatgaagaattcaaaacggtcggtgatttccgggttaacatcattacggcgtgccagcggtgacacttctgccggatattccgtaataaaggttggctgaatcagatgtgcttctgccacttcatcaaagatctccgtgacaatacgtcccagcccccagcttttctctaccgtaataccgatagattcagctaatgctttagcagcatcaaaattatccaggtcggccatatcggtttctggacgatattttttgattgcttcgcgcatggtgagtttttcaaacggtttgccgaaatcaaacacatgctcgccataagtgactttagtggtacccagaacctcttgtgccagggtgcggaacagggactctgtcagttcaatcaaatcgtggtaatccgcatacgccatgtagagttccatcattgtgaactcaggattatggcgaacagaaataccttcattacggaagttacggttgatttcgaatacccgttcaaaaccgcctacaaccagacgtttcagatacagctccggcgcgatacgcagatacatatctaaatccagagcattatgatgggtaataaacgggcgagcagatgccccacctggaattacctgcatcatcggggtttctacttccataaagccgcgcgcgaccatgaactggcggatagcggccagaatttttgaacggacaacaaacgtttgacgggatttatcgttagcgatgaggtccagataacgttgacgataacggacttcctgatcctgcagaccatggaatttatctggtaaaggacgtagtgctttagtcagcaggcgcaactcagtacagtgaatggaaagctcacccgtttgcgtcttaaacagcgtaccgcgggcaccgataatgtcacccagatcccattttttaaactgatcgttataaacaccttctggcaggctatctcgtgcgacgtacagttgaatacggccaccgacatcctgcaacgttacaaaggaggctttccccatgatacgacgggtcatcattcggccagcaaccgagacttcaatgtttaaggattccagttcctggttatccttcgcatcaaactcttcgtgcaactggtcagaggtatggtcncggcgaaaatcattgggaaacgccacaccttgctgacgtagtgccgccagtttttcgcggcgatttctcagttcatcgttaaaatcaatagcctcattggctccccgtgtttcttgttcagacattttggttcctctaaatccagctttcaatttagcgtagataaagagacagatcggtacactgtattatctgcctcgactattaataactcagtttatcttatcgaaactaacgcttacctcaagttgatatcactaataaataaccatcaaaatggtttaaatgacttattaatctcgatttactagtgtgataaactgaaagttaatttattcataaccaattgtttttacgacagttaatcgttgctctcctgtaccatattcgtcggcgtgctaaacaggaaacgggtagcaaaggccaataccacgatgatcgcgacacaagccaacgtccactctcccatctgagaaaagaatcgctggtaagctgcaattgccataccgctaatttgcgactctgtcgtctgctgtgccactacgcctgccagccagttggcgaccgcgcctgttgccagcatataaatcccggttaatacgccagacattttcagacgcgtgatttgcgcaatcgccaccgggtcaataaagagttcggcaaagcccattagcgccagcccggataccatcacgcccattgacgcttgaccgtcagctgctgcatgtcgggcatcaaatgccagcaacataaagccacaagccatcagcagtaagccaaaggcaaacttcagccagacgcgcaatgttgagttgccgtggctttctggcgacgccagccaggccagaacaaccccagcgagcatcaccgcaattgcattcaccgactggaatagtgcagtaggtacttcaatattgaatgcctgacgattcacaaagcgatcgataaacaagctgatggtactgccgccctgttgtgccagtacccagaacaatgtcccgacaaacatcaacaatacaatttgccaaagagcacggcggtgttcggggaatttgatcatcatgcgggcaatgatttgtgcggcaatgaggcaaacgatcgccagcaaatatccggaccagtcgttctccagcagcagggtaaaaaatactggggctaaacagagcatcaccactaaccagctccataccggtaaggcaaatttgacgctagtgagcgcttttttatccatactacgcgtggactggaaatgacgatgcccgcttaagaaaatcaacaaaccgataaacatgccgccacccgcaagggcaaagccaacatgccatccataccactgagcagccaggccgcaggcgattggggcggcgatagaaccgatattgcccgcagcatacagcagcgaaaaaccgccatcacgtcgatgatcgttctcgtcgtagagctcgccaagcaaacagctgatgtttgatttgaataaaccgtagccacaaataatgattgccagcgccagatacaggctaaaggttgaatttgtatcaatacccagcaccacatggccaagggtcattaacagcgcgccggcaatcactgcagtgcggttgccgagcaggcggtcggcaagccagccgccgagaataggggtaacgtaaaccagagaagcatatgcgctgaacaggctgatggcatggttatcatcaaaaccaagctgatgggtgagatagagaatgagtaaggcacgcatgccgtaaaaactgaagtactcccagatttggatcgccacgatatagtatatcgcgcgcggctgtgagggtgttttcatgtgttctccttatgagcaaaaaagggaagtggcaagccacttcccttgtacgagctaattattttttgctttcttctttcaataccttaacggtatagcggccatcagcctggcggtatgcaccgtgaatatcggtttcaaagcccggatagtgagcgccgatttcacacagcatctgcaggaactccagaaccggacggctttcttcggtgatcatttcacccggcattaccagaggaactcccggcggatacggaaggatcatattggcgttaatacgaccgaccatttcgtcgaggtaaacttcttcggtcataccgtgcagctctttctggaatgcagcatacggagtcattaccatcgtcggcagcacttcaaatgcgcgatacatcagatccggcagattgtggtgaacaatcagtttgtggatattctgagccagttcctgaatacgcatgttttcatagaattcaggatcttcacgatacagagacggcagcatgtttttcacacgcaggttcaggtcgaacgcacgtttgaagtcagtcagagcacgcagcaggctcagtgctttggtcttatcgataccgatgctgaacaggaacagcaggttatacggaccggttttctcaacaacgatgccatgttcgtcgaggtatttcgccacgatgctggccggaataccaaagtcgctcatggtgccgtctttttccatccccggagtcagcagggtgactttgatcgggtcaagatacatgtgctcgttatcgatgtttttgaagccgtgccaggtgctgtcagaacgcagcggccagcattcagtcgtatcgatatgatccggctgccatacatcaaagaaccagccatcagattccgttctcagacgtttgatctctttacggaatttgatcgcacgttcaatggaaccgttgatcagacgcttacctgcattgcctttcatcatcgccgcagcggtttcagtggacgccacgataccgtagtgcggagaagtggtggtgtgcatcatgtaggcttcgttaaaggtttcttcgtttacgtcacctttaacgtggatcatggaagcctgagagaacgccgccagcagtttgtgagtggactgggtttcgtaaatcactttcccttctacacggccaccgctcataccgcatttaccttcgtaaatcggtgagaagttggtgtaaggcacccacgcggagtcaaagtggatggatttcacatccagtgttttcttgatgaagtcggtgttgtacagcagaccatcataggtagagttggtaattacagcatgtaccggccaggttgcgtttggtgtttctttcacgcgcttagcaatggtagcgtgctggaattcactctgtgggataccaccaagaataccgtaagcgttacgggtcgggcggaaatagattggcgtaacatcgctcatcatcatcaggtgggtcagcgatttgtggcagttacggtcaatcagaatggtgctgcctgccggagcagagtacataccaacaattttgttcgcagtggaagtaccgttggtcaccatgtagctgcggtctgcgttaaagacgcgagcgatatactgttctgcttctttgtgtggaccactgtgatccagcagagaacccagttcagatactgaaatggaaatatcagatttcatggtattcggaccaaagaaatcatagaacaggctacctaccgggcttttctggaatgcagtaccgcccatgtgaccaggagtacagaaagtatatttaccttcacgaacatatttaaacagtgctttagtcagcggaggcagaatagtgttgatatattcgtcagtggtctgcttgatcttgttagcaatatcttcagcagcacccagcgcatattcaaagaagctaatctgtaaacgcaggtcattcaggcttacatcgagagtggaatacgtattagcgaacgcgtacaacggcaggttctcgttcattttgctaatttcttcgcacagctcgagattatatttatcccagtcaaaaataacgccncacagacgcgcattgttttcgatcagttttaataagtcgtcacggtcgttcgggtaaacaatctggaagttcagacgttcaagcgcgcgatgaagttcacggatgggttcttctttaaaataaacccccatgtgattcaatattgcaataacgttcatagtcatatctccaggtaaaaaaggcccctcccaacacatgggacaaaatgaaaggaggagcctcggaaaatacttttaattaatgtgcgttagacgcggtgtggttatccattgagtggctctggcgctcgtgcattttgcgagcgtagaacatcaggataatcaggctgacgatgaaggtacctgccagctcgaaggagcttgcgcccatcagcgcgatgaagcagaacacgcaacccagtacagagcagatcaggctgacaaagttgcggatgttaacgccttcaaaacgaatcaggtcaacgcaagagtagaagtacggcagcatagtcagcagtactgcgataccggtcagttcaccgaacaggtcagatgctttaccaccggcagagttcatcagagtgatgaggatcatcagggcagtcattttcactgcagccagcagcagaccttttttcggaataccgttgctgtcgacttcaccataaactttcgggaagttaccgtcgttagcggcacgtacacctgcctggcctaccaacatcatccaggagcccagagaagtcaggcacgcaaaggcggtgaatgcagaaaccagcggcgcagcccagttaccgaggatagttgaagcactgattgcaaacggagcaccggaagccgccattacagaagacggatacataccggaaagcacctgagtcgcagcgatgtaaacaatacctgntaaaccagtacccagcatggttgccagcggaacggtacgtttcgggtttttaaccataccagtacttacagctgcggattcaacacccacgaaggcccacaggcagagcagaatacttttaatgatcgcatgaccatcagtggtatccgcagtattccagttagctgcataagttgccgcatcaaaccaatgccagccaacaatagcagtcatcaccacaggaataagaaccagcaccagaccaatagtggttaaacggcttacccaggtaccgccgagcatatttacaaaggtaaatacccagacgatagcaatacaggcgatacccgccggaacaggatcatttaatactgggaagaaggtggaaagataagatacagcggtaataccaatcgccaggttaccaatccagttagcatggtaataaagaacacctgtctgaaaaccaaatgcaggagaaatttctccggcataagcaattgggccaccttgttgcgggttttttgttgccagtcgggcatatacatacgccagcgacattgcaccaataatagagataatccaaccccagatagcaataccaccgatacttgctaggttcgcaggtaataatgcaataccgctccccatcatattaccggcaacaacaccggtacaggcaaatagcccgatcttcttggcagaactcatgctcttctcctaatttcatttttgaatttggagtccgggtcatgatgtataactatttcctgaccagaccaaactggcgctaagattactcacgaaaaaaggattaatcctaaagattaggtgaaataacacaaaagtttctgtaagtgagaacttgaggttttttattaacacatcaggatcgcaagttgatatcatgaaaagataaacattcaatgtttacaatagattgcgtgacgtcttctggttaaatttatgtaannnnnnnnnnnnnnnnnnnnaattgccgcaacatattataccaacaggaacatacaaaaactcaacaacaaatattcccgagcatgaatcaacccgggggttacttattctgaagcgagaaatttgtcgagataaggtacaacataaggaacagaagtctggaatataccattttcaatccagtaaagggtgtttgcccctgggcgtaaattaaaggcggtgagatatgcatcagccgcttcccggttcatccccttcatttcataaaccttgccaagcaatacataatttagccaggacatttcaagatcaatgccagtatttatcgcctggtaagactcatctgttttaccttttaccagagcactgaccgcttttatttgatatataatggacaggttattcaattccggtagtgtaacaatgttatctatttctgtgttcagtgctgctaattgtttttcatctaaaggatgttgagaatggcgcacgatatcaactaatgctttttctgctctcgcgtaggtaaattctggggatgattgaacaatctcacctaataattcactggcacggttcaatgatttatcatcgccatgcagtaaataatcatgtgcctgataaaaattagttaataacgcaccacgatgaggcaaaatttgctggagcgtctcctgcattcgttgtggccacggttggtttaacgcttttgataaactctccagtaaatcattttgaatcgccagctgattaccgttagtgatgacataacgtttatccagcatggttgaaccatctgcattgtctaccaattttatcgacataaagcattgttgagcacggtattggcgctgattaacaaacgcaatagataatgttttaccggaactgctcggttcatcaatgttgtagttgattttgtcatgcaccataaaggtggagaaggtgttaagtgatgtcgccaccaaatcacccacgcctatcgcgtaagagagctgatacggggaactccagctgttacaacttttatttaccatattaatgtcaatatcgcgtggattgagcaaaatacgcgatttgctcatcggaagacgtgtatcaagacttgaaaacgctaccagtgctacacagatacctaaggacaacaggaaaaaaaaccatacccaaaaggtagtgaatcgtttgcttttaactggggattgttcaggtggcgttgcggtgttttgaatgttaagactgtgggagggagaatctgtggcaggaaccgcctctggtatagggggaggcgaagatagcattatttcctctccctcttcttcgctgtaccagataaccggcaccattaatttatagccgcgctttggtactgtagcgatatagacaggactatcttcatcattatcttttaatgacttacgtagttctgagatactctgcgtcacaacgtgattggtgacaatacttctcttccagacattatcgataagttcatccctgctaagtacttcgccactgtgttgagcaaagaaaaccagaaggtcgattaatctcggctcaagggtaagttgacgcccattgcggctaatttggtttatggacggagtaacaagccattcgccaacgcgaactacaggttgttgcataatagaaactcattcgaaaagggaatgatgcaatgataattgccacaacctatttttaccatctatagatgggtttatttacatattattggtgaatgcaagacgttatttttaccagccataaacttcttgattacatggtattacgaaaggattttactgagaaccagaagtaatattccttaccatcaaaattcatcatctttgccaaagaaaaatgttcagaaaataatccatggaaaattgtccggagcgcttactattttaatggattgttagtctttgcatgagcaagcggactgatacatttctctttgttctcattcagaaaatctcatcagtcggcgttcagaccgatgttgcgctttatggatgcgttacgctcctgatgacgtcatttgacgttcaacagcatcacggggccgcacgacatttcacgttagttagtgctatagctcaggaacaaattttcccgaattgggatatgcccgcaaattgctggtgatgtggggagaatcgggttgagttcggtagaattgatttggaggcagaacacttaaatcgtggtgtcctgaaacgaaaaacggacctccgtggaggtccgtttatatgaatttggtgcccggactcggaatcgaaccaaggacacggggattttcaatcccctgctctaccgactgagctatccgggcaacggggcgcattaaaccgtaatctgcacatctcgtcaacctaatttcagtaaaagcgattcaactgcttaagattgcggcaaatcgcttcttttctgtgtttctgtcaggtcagtgcaccaccctggcggcagcgggcgaagcgcaggatatcttccgccagccgatgtgcggtgttgacatccgcctggctacgattcaccagcattcggcttaaacagccttccagcaccagttccatctgctttgctaccatcgccggatcgtcaacttccagcgtggttaacagttcgtgggtgaaatcgtaggccgcgcttttttgctgatcggccagttgatgaatagggtggccaggatcgggataaaacgtacaggcagcgataaacagacagcccggatagcggttgtttttaacgcactccgataacgcctgataacgtgccagcagcttttgttcggcggtttgcgtttcgtccagcatcagctgacgacgccagacatctatctgttggctaagataacgcagcgcatcgtagaggattgcctctttgtctggccagaagcggcgtagctcgtccagtggataatccacacgttcagcaaccatctccagcgtggtgttggcaatcccttgtaattctaataatttcagggcttctcccagtacatcttcacgttgcacgctattttcctccgtctttcccactgcaagtgtcgttcacggttggcgatcgcgcaaatgtgcgctgaaggtttcagcatccataaagcccgtgacgcgtgcttgtggatgctcctggccttgtccgtcaaaaaagagaattgtcggtaggccaaggacattaagatgctttaacagcgccacatcttgtgcgtcgttggcagtgacgttggcctgaagtaataccgtgtctgctaacgctttttgcacctgcgggtcgctgaaggtgtatttctcaaactctttacaggcgacgcaccagtcggcataaagatctaacatcaccggtttgcctttggcttcaacgagcgcctgatttaactcatctaccgttttgatttgtgtaaagttgagatgcgtctgagtttgcgcggtatgcgtcgcaccaaatgcccaatcctgaagtgggcgcacgctaaccaatgccgctgcaagcaggattatttgcaccacgcgcatccagccgcgtttggcctgtaggctggtgataaaggcccagccaaagaatgcgacacccagcgccgaccacaagcgtaatccccatacatcaccaatcactcgctccagcaggaagaccggcagtgcgaggatcacaaaaccaaacgcggttttgacttgttccatccacgggccgcttttcggcagcaagcggttaccaaagacggtaattagcatcagcggcaggcccatgcccaacgcatagagataaagcgtgccgccgcccagccacatgttcccgctttgggcgatatacagcagaatcgcgctaagcggtgcggtggtgcatggtgaacagatcagtccggcaatcgtccccataataaacactccgccgggtgagccgccctgttggcgattgctcatcagcgtgaggcgcgtttgcagcgaggaggggagttgtagagtaaacaagccaaacattgacatcgccagcaaggtaaagacgatggcgaggccaatgagcacgtatgggtgctgtagcgccgcctggaactgtaaccctgcggcggcaactaccagacccagcgccgtgtaagtcagtgccatcccctgcacataaataaaggtcagcaacaatgctctggcagtggagagccgctgtttaccacccagcacgatgccagaaatcagtgggtacattggcagcacgcatggcgtaaaggcgataccaataccgatcaacaacgcccagagcgcggaaaagggcaattgcgcggtgggctgctcttgctgcggaacagacacaggctgtgacgctgcgttgttggcgaccacttcgcttaacggaacggttttggtttctggcggataacagaaaccggcatcagcacagccctggtaggtgacagttaacgtcgctcccgcactcgcctggttgatggttacgggaagcgtcagccgatcgcggtaaatctcgcttttgccgtaaaactcatcttcatgccagacgccttgcggcagctgcacgtcggcaattttcgcgtgttccggcgtaatgcggatctgtttacggtagaggtagtaaccgtctttgatctgccaggtcagattaaggtcatgttggttttgctgaaaatcaaaagcaaaggcttgatccgcggggacaaattgtgaacgtcccggcgcgtcgaataatccggcaaaaacggaagtgctgcaaagtagcaggatcagcgtaaagatgcgttgagccatgagaggtaatctgtgtctccgtgtgtaacaggtaaaaccagaagttccggggtttgatatggatgatgagacttcaggcattccagcagtgcctgctggtgagatacggtagtttttaaaatcatctgcacttcgtattcttgctccagcttaccttcccagtaatagagagaggtagcgccggggatcaaggtcgcgcaggccgccagtttttccgccagcactttggcggctaaatcctgggctgtcgcttcatccggtgcggtacatagcaccacgacagacgcggtattcgaacttttttcatcaagcataaacacctcgcaagaacagatggaaccgcaagagagaggtcactatacaacggacggggaaaggatgttagtcggcgagaaagaaagcggggcgtgaacgccccgcgattggtcattacagcatgaagctacccagcacgaagccgaagcaaacggccagggcaacacccagagtacccgggatgaagaacggatggttgaagacgaatttaccgatacgggtagtacccgtgtcatccatctgtaccgcagcaaccagcgtcgggtaggtcggcagaatgaacagaccagacaccgcagcgaaagaagcaacagcggtcagcggagaaacgttcagtgccagagccatcggcatcagtgcttttgcggttgcagcctgagagtacagcagagcagaagcaaagaagaagatgacggccagcagccacggatgaccctgaatcacttcaccagcggtatctttgatccagtcgatgttgttggaaacgaaagtatcgcccagccacgcaacacccaggatacaaatacaggcgctcatacctgctttgaaggtgctggagttgaggatgttgtcggtatcgactttacagataacggtggtcagagttgcaacactgagcatgatgatcaggattgcgttggtggtgttcatcagcggtttttcaaccagacccatgcttgggctgttgatgattgcatagataaccacgccaactacgcccagcaggaacagccagacggacgtttttgcaccggatttgatttcaatctgcttttcaccgcgcagttcaaccaggccctcttccagacgcttgcgataaatcggatcgtcagagagtttggagttgaacagcatagtgaccaggaaggacatcaccagaaccgccagcagggtggacgggatgaccacggagagcagatggaggtagctgatgccatgaccttccatcacggaagacatgtaaaccactgccgctgagattggcgatgnggtgatcgcaatctgcgcggataccactgcagtagacagcggacggcaaggtttaacgccttgttccttcgcaacttcagcgataactggcagtgtcgccagagagatgttgccagtaccagcaaagatagtcaggaaataggtcacgatcggtgcgaggatcgtgatgtatttcgggttacggcgcagcagcttttctgtctgatgaaccagatagtccagaccgccagcaacctgcatggcagaaatagcggcgataaccgccatgatnatggaaatgacatcgaacgggatgttaccgggtttaacgccaatagcggcaagaaccagcacccccaatccgcctgcaaaaccaatacctattccccccaatctggcgcccaagaagatcgccagcaaaactatgatgagttctacaactagcatattagccttccttgttttttaacaagttgatattagattgttatttttaagttactgctcacaagaaaaaaggcacgtcatctgacgtgccttttttatttgtactaccctgtacgattactgttcgctttcatcagtatagcgttttgctttgtaagccgggtgcatcagattctgtacggagaaaatatcgtcaagttccgcttcagtcaacagaccgcgttccagaacgacttcacgtacactcttaccggtttcggcacagattttacccacgatgtcaccgttgtggtgaccgatgaacgggttcaggtaagtaacgataccgatagagttgtaaacgtaaccttcgcacacttctttgttagcagtgatgccgttaatgcatttttccagcaggttgtagcaagcgttggtcagaatgtgaacggattcgaacatagcctggccaatgaccggctccataacgttcaactgcagctgacctgcttctgctgccatggtaacagtggtgtcgttaccgatgactttgaagcatacctggttaaccacttccggaacaaccgggtttactttagctggcatgatggaagagcccgcctgcagttccggcaggttgatctcgttcaggccggcacgtggaccagaagagagcaagcgcaggtcgttacagattttggacatcttcacagccaggcgtttcagcgctccgtgaaccataacataagcgccgcagtcagaggtcgcttcgatcaggtcttcagccggtacgcatgggaagccagtaacttcagccagttttttcactgccagcggagagtactctttcggcgtgttcagaccagtaccgattgctgttgcgccaaggttaacttccagcagcagttcagcggtacgttggatgtttttcacttcttctttcagcaggatgctgaaagcgnggaattcctgaccgagggtcatcggtactgcgtcctgcagctgggtacgacccattttcaggatgtcctggaattcgaccgctttacgttcaaagccttcacgcaattggttaatcgcatctaccagcttaatcagggaagagtaaactgcgatacggaaaccggtcgggtaggcgtcgttagtggactgacatttgttaacatggtcgttcgggttcaggtactgatattcacctttctggtgacccatcagttccagaccgatattggccagcacttcgttggtgttcatgtttacggaagtacctgcgccgccctggtagacgtctaccgggaactgatccatgcattttccgttgttcaggacttcatcacatgcggcaatgatggcattcgctacacttttaggaatggtttgcagctctttgtttgccatagctgcggcttttttaaccattaccatnccgcgaacaaattcaggaatatcactgattttgttgttgctgatatagaagttttcaatcgctctcagagtgtgaacaccatagtaggcatcagctggaacttccctggtacccaacagatcttcttcgatacgaatgttgtttgacatgtgaaccttctttttcaagctgccaatgatttgctttaaacacacagaatatatgtggtttcgaatgtttttcgaccgacgattatcccctgcatcgaccgaatatccgagatcatatgctgcttgaggatttctaccgtaatctggatcactttaagtgtcggtttttaccccttaattattaatttgtgaaatagatcaccgctttgggattactaccaaaaatagttgcgcaaatatcttgaaattttgctaatgaccacaatataagctgaacgcgattcgcaacccattcaggtagccgggtttaaccggctgctattacaggagaaacctttgcgctggttaccttttattgccattttcctttatgtctatattgagatttcaatctttattcaggttgcccatgtattgggggtattgctgactctcgtgctggttatatttacgtcagttatcggtatgtcactggtacgtaaccagggctttaagaatttcgtgctgatgcagcaaaaaatggcggcgggtgaaaacccagcggcggagatgattaaaagtgtttcgctgatcattgccggtttgctgcttttattaccgggctttttcaccgacttcctcggtcttctgcttttattgccgccggtgcaaaagcatctgacagtgaagttgatgccgcatttgcgcttttctcgcatgccaggcggcggttttagcgccgggaccggtggcggtaatacttttgatggtgagtaccagcgaaaggatgatgaccgcgaccgccttgatcataaagacgatcgccaggattaatgtcgaaacgccggattatgtggttatgccattttccggcgtttttcgttttggcagaaacagccataaccccgccagcatgatcagcgcatagagacttttccagccgaccattgccagtaacagaacgcataacagcccgccaaccaccgccagtagtcgataacgaccttgcaataatttacagcctgccagcatgcataacagataaatcataataaagatgccattggcataaataataagagcgtccagattgatctctaaagcatgaatcaccaacgtgctcaccacgcagcagccgagcaccgcattgagggcattattcgggatatggcgagaagagaggcgtgccaggtagtggtcaggattatgttgcgcctgcgaccagaccaggcgggcgaagctctgtatataaatgttgagactggcaaagcaggccagatagccaattacgcaggcaatccataacgctcctacaccgaacagttgtactacaatttttggaagcgatgctgccgcggccatttgttcaccataggcgtcgaagtgtaagacgactaccgtacagccccagtagactaatcctgccagcagcagaccaatcatcaaagcacgaggaaaatcacgttctggatttttaaattccgaggcaagatgggcaaatgcttccagaccgacaaaacaccagaacatcactgataacgcagcaaataacccggtaagttcgatatttcctggcgcggggaaggggatactcgcaggtttgatatcgcccgcccaccagatagcgacaatcagtgcgacgataagtccggcaataactgtttgtagatttgcactggaactggcaccgcgagtaccgatataccacaccaacgccagcgtaccgagttctgccaacaacagttgccagctatgccagccaaacattgcctggccgaatccggcagcaatttgtagcgcggcaggcaaacccacgggaatgaccgataaaaacagccagccggtgactcgctcaagccgcgaaccaaacgccataccgacgaagtgcgcgacgccgcctgcgctgggatagtggcgacccagaatcgcaaacacaatcgcaatcgggaacactaagataatcaaaacgggccacgcccacaggctgttattgcccgctaccagtgcagctaacgcaggaacggcaaacacgccagtgcctaataatgacgtcgatagcaggccaatgccctgggccagccccagttcttgtttgagtccactcatgggttgatgtccgattgcgcccaaattttgggcaactgcgtagattttcgatggtagcacaatcagattcgcttatgacggcgatgaagaaattgcgatgaaatgtgaggtgaatcagggttttcacccgattttgtgctgatcagaattttttttctttttcccccttgaaggggcgaagcctcatccccatttctctggtcaccagccgggaaaccacgtaagctccggcgtcacccataacagatacggactttctcaaaggagagttatcaatgaatattcgtccattgcatgatcgcgtgatcgtcaagcgtaaagaagttgaaactaaatctgctggcggcatcgttctgaccggctctgcagcggctaaatccacccgcggcgaagtgctggctgtcggcaatggccgtatccttgaaaatggcgaagtgaagccgctggatgtgaaagttggcgacatcgttattttcaacgatggctacggtgtgaaatccgagaagatcgacaatgaagaagtgttgatcatgtccgaaagcgacattctggcaattgttgaagcgtaatcctcgcacgacactgaacatacgaatttaaggaataaagataatggcagctaaagacgtaaaattcggtaacgacgctcgtgtgaaaatgctgcgcggcgtaaacgtactggcagatgcagtgaaagttaccctcggtccgaaaggccgtaacgtagttctggataaatctttcggtgcaccgaccatcaccaaagatggtgtttccgttgctcgtgaaatcgaactggaagacaagttcgaaaacatgggtgcgcagatggtgaaagaagttgcctctaaagcgaacgacgctgcaggcgacggtaccaccactgcaaccgtactggctcaggctatcatcactgaaggtctgaaagctgttgctgcgggcatgaacccgatggacctgaaacgtggtatcgacaaagctgttaccgctgcagttgaagaactgaaagcgctgtccgtaccgtgctctgactctaaagcgattgctcaggttggtactatctccgctaactccgacgaaaccgtaggtnaactgatcgctgaagcgatggacaaagtcggtaaagaaggcgttatcaccgttgaagacggtaccggtctgcaggacgaactggacgtggttgaaggtatgcagttcgaccgtggctacctgtctccttacttcatcaacaagccggaaactggcgcagtagaactggaaagcccgttcatcctgctggctgacaagaaaatctccaacatccgcgaaatgctgccggttctggaagccgttgccaaagcaggcaaaccgctgctgatcatcgctgaagatgtagaaggcgaagcgctggcaactctggttgttaacaccatgcgtggcatcgtgaaagttgctgcagttaaagctccgggcttcggcgatcgtcgtaaagctatgctgcaggatatcgcaaccctgactggcggtaccgtaatctctgaagagatcggtatggagctggaaaaagcaaccctggaagacctgggtcaggctaaacgcgttgtgatcaacaaagacaccaccaccatcatcgatggcgtgggcgaagaagctgcaatccagggccgtgttgctcagatccgtcagcagattgaagaagcaacttctgactacgaccgtgaaaaactgcaggagcgcgtagcgaaactggcaggcggcgttgcagttatcaaagtaggtgctgctaccgaagttgaaatgaaagagaaaaaagcacgcgttgaagacgccctgcacgcgacccgtgctgcggtagaagaaggcgtggttgctggtggtggtgttgcgctgatccgcgtagcgtctaaactggctgacctgcgtggtcagaacgaagaccagaacgtgggtatcaaagttgcactgcgtgcaatggaagctccgctgcgtcagatcgtcctgaactgcggcgaagaaccgtctgttgttgctaacaccgttaaaggcggcgacggcaactacggttacaacgcagcaaccgaagaatacggcaacatgatcgacatgggtatcctggacccaaccaaagtaacccgttctgctctgcagtacgcggcttctgtggctggcctgatgatcaccaccgaatgcatggttaccgacctgccgaaaaacgatgcagctgacttaggcgctgctggcggnatgggcggcatgggtggcatgggcggcatgatgtaattgccctgcacctcgcagaaataaacaaacccccgggcagaaatgtctgggggtttttctnttggccatctttctagtataagattcagacacggacgacgcgagtggcgtccagctcattgattatggggaataacatgcacgtaaaatacttagcagggattgtcggtgccgcgctactgatggcgggttgtagctccagcaacgaattgagtgctgccggtcagagtgtacgcattgtggacgagcagccaggcgcagagtgccagctgattggtactgcgacaggtaagcaaagcaactggctttccgggcaacacggagaagagggcggttctatgcgcggcgcagcaaacgatctgcgcaaccaggcggctgcaatgggcggtaacgtgatttatggcatcagtagcccgtcgcagggaatgttgtccagttttgtcccgacggatagccagattatcggccaggtatataagtgcccgaactgatgtgatggtgacaaacgtataattgccagatgcgcttcgcttatcaggcctacataaggcattgcaactgattgaatgcttgagaatttgtaggccgnataaggcgtttacgccgcatccggcatgaccaacgatcacgttatcagtcatttcaggctggatggctccagcctcgcattagcaaagatgagattatttcgcctgtggtgcagttttgctggtggattgaacacgtaagtnatgcagcgcgcgtaagcattgatcctgggttagcggttgggcgttattcgccgctacggtgcgaacatagacctgacatggcacacccacgagttttttcagtcgtgggctgaaatcaagcattcggcgagtgatcgcctctatttctttacccggcgttgcttcacgcgttttcaccactgcgccgctaaattgttctttgccactttcatctttaaagcggtaaagcaccgccagataatggtcgaacaagttatgtttccattccggttgggaataggtgtcatattccagattgccattttgctggcagtcaacgtcatataacggcaggaaatctaacagtgaggtaatacgtaatgccagttcacgcatttccgcattattaattgcatgaatgattgctcgcgccagcatttcaatctgcaactcattgacgactaactcacatttgctaccgtcatgtagcgttaatacgaaggcatttctcaattaaataattnnnnnnnntnnataagccagataaatgggcttggtagtaatagttgttaaaataacataaatagccgtactcactctatataaacagaaaagaaaggttaattattggtgttggttatataaagagtaacaacagcaatgtatatgaataattaaaggttatgtaacgggcaaagattaaacttccctgtttaatcagttactgctggcgtagctggagatccagcggcgttttgctgggttcgccgccaatttctcgcgccagtttcggcaccagatatcccgacaccagtgtcagcaactcacgcataatctgccgtgcttcgtcatcactcaccataaaatgcgccgcgccctgtactttatcgagcacatgcaggtaatacggcatcacgcctgcatcgaacaacgcattactcaggtttgccagcgtttgtgcgttatcgttcacaccacgtaacagaacgctctggttcagcaaagtaacgcccgcccggcgcaacttagccatcgcctgacggaatgtttcatctatctcattggcatggttgatgtgattcaccagcaagatttgcagcgtagaatgtgaaaagcgttcaaccagcgcatctgtgatgcgtgccgggatcacaatcggcagacgactgtgaatccgcanacgtttgatatgcgggatggcttccagttgtgtgagcaaccagtccagctcgtgatctttcgccatcancggatcgccgccggagaaaatcatctcgtccagttccggatgcgcagcaacatactcaagtgcagtttgccagttacgcttgttgccctgattttcggcataggggaagtggcgacggaagcaatagcggcaatttaccgcgcagccgcctttgaccagcaaaagcgcccggttgtggtatttatgcaacaaaccaggcactacgctgtgctgttcttccagcgggtcggtggagaatccgggcgcgacgacaaactcatcttgcgaggtaagtacctgacgcaaaagcggatcgtccggattgcctttctccatgcgatcgataaatgagcggggcacacgcagggcaaacagctttttggcgttgcgtccggccaacagtttttcgtccgcgtctatattcaaaagacgcagaagttcatcaggatcggtcacaacatcggcaagttgcgttaaccaatcttctctggatggggtatttagggttacaatatgcgccattttgtggcttagctaccaattaacaaatttcagagggccttatggcaacgtactatagcaacgattttcgtgctggtcttaaaatcatgttagacggcgaaccttacgcggttgaagcgagtgaattcgtaaaaccgggtaaaggccaggcatttgctcgcgttaaactgcgtcgtctgctgaccggtactcgcgtagaaaaaaccttcaaatctactgattccgctgaaggcgctgatgttgtcgatatgaacctgacttacctgtacaacgacggtgagttctggcacttcatgaacaacgaaactttcnagcagctgtctgctgacgcaaaagcaattggcgacaacgctaaatggctgctggatcaggcagagtgtatcgtaactctgtggaatggtcagccgatctccgttactccgccgaacttcgttgaactggaaatcgttgataccgatccgggcctgaaaggtgataccgcaggtactggcggcaaaccggctaccctgtctactggcgctgtggttaaagttccgctgttcgtacaaatcggcgaagtcatcaaagtggatacccgctctggtgaatacgtctctcgcgtgaagtaatgcggttgtggtgcggcctgcaggctgcaccatcacttattcaggtcagagatgatgaaacgccttatcgttcttgttttgcttgccagcacgctgctcacgggctgtaacaccgctcgcggtttcggcgaagacatcaaacatctcggcaactccatctcccgcgctgccagctaatttttcttctcttccgaaaaatcatcagatttccatcatttttggcgatgttgtctattattaatttgctataggcaaacataaataacattacctaaaaggaagacgttatggtgaagaagacaattgcagcgatcttttctgttctggtgctttcaacagtattaactgcctgcaacaccacgcgtggcgttggtgaagacatttctgatggcggtaacgcgatttctggtgcagcaacgaaagcgcagcaataagcaataacggtacgacagctgtgtcgtgccgtttgttttttctgcgatagtcacaaaggtaatagttgaaattcccctgccacctggcaaaatatccgttcaaccatcagctttgcaggacgacctgcaaacgcgtcttttcaccggggacggccccaattctccggagcctgatatgtcctggattatcttagttattgctggtctgctggaagtggtatgggccgtaggcctgaaatatacccacggctttagtcgtttgacgccgagtgttattaccgtgacggcgatgattgtcagtatggcgctacttgcctgggcgatgaaatcgttaccagtagggacggcttatgccgtgtggacgggtattggcgcagtcggcgcggccatcaccggcattgtgctgctcggtgagtccgctaacccgatgcgtctggcgagtctggcgttaatcgtattggggattattggtctgaaactcagcactcactaactaccgggctgctgtacccaaataaacttactgacatcaaacccttcccgggtcgcgactgccagcatctcctgtttcacttcgtcagaaatggttggcgtgcgggagagtatccacaggtagtcgcggtccggtccgcaaaccagcgcatggcggtattcccgatcgagtgcaataacgttataaccgccatagaaaggaccaaagaatgacactttcagcgcagcgcgagttggtgcgccggtaaagtacgctttcccttcactctgctgccacattcctctgtcagggttatagcctttattaatgacattcaggccgccgtcatcacgcaggctgtatgttgcggtgactttttccagtccacgttcaaagcggtgatcaaaacgggcaatctcataccaggtaccgagatagcgtttagcgtcgaaattattcactacggtcacgccacgcggcggcgtaggagaactgcaggcaacgaccagaaatgcagctgtcgctgcggcaacgagagggagcaggcgcataaatgtttccttactggttttttctaagtgtagatgacagcaaggaaaagcgcagaaaaggtccgaaaattcggacccgatgaaattttactgtagagcgttgagaatctgccaggcggnggcgactctcgctggattgggatagtttttgttagccagcatcacgatacccagctctttttctggaataaacgcgacatagctaccaaatccgccggtcgcccccgttttatgcacccatgatgctcgtactgcaggagttggaggcgtaatcgcttttacggggcgtgctgccagtgcaattttattgtcactgccgttaacgatgatgtcaggatttaccggccagtccagcatttcccagcccagaccctgatacatatcgccggtttgccagtagcgagattgtgccagttgtatcccttgctgaagtgttttgtcgttgatatcacggggattcatattgcttcgtacccagcaggccatatcttcaatggtcgacttcacaccataagtttcagcatctaacgcccctggcgaaacatgaactgccttgccttcgcgatatccccaggcgtaattcttttcttctgcgggcggtacattaatccacgtatggttgagtttgagtggctggaagacacgagtttgcatcgcctgctcaaaactcaaaccagacggcttcacagccagtgcgccgaacaaaccgatactggagttggcatacagacgttgtgttcctagagcccatgcaggctgccagttttgatagaagcgcagcaagtcgcttgaggatttcacttcatccggcacctgcaatggcaggccgccagcagtgtaggttgcgagatgtaatagtgtgatcccattccactgtttagcggtaagttcaggccagtattttgttgcgggatcgcttaacttgatttcccctcgagcaatagcgtcgccaccaagcacgcccgtaaatgttttgctgaccgaacctaactcaaacaacgtttgctgtgtgacgggctgctttttggcgatgtccgcatacccccaggtaaagtaataaggtttaccctgataaattaccgccaccgccataccggggatcttttgttgctctataagcggggtaattgtgcgatgcacaatatcgttgatttgttgaggggcagcaaatgtggagcaagaggcggtaattaataaggcgcagagcgtcgttttgaacatagggtctggtttccatacaaaacggcccgccataggcgggccggatttacattggcgatgcgttagattgtaacgacaccaatcagcgtgacaactgtcaggatagcagccagaccgtagaaaacccatttgcccgcaggtacgtggattttcagatcgtgcatcgcgtggtgcatacggtgtaaaccacaccacagcggcagaacgatcatcaggaacaggaatacgcgaccaatgaagctctgcgcgaacgccagaacgcgctcgtagctcagtgcatcacccggaaacagccccagcggcagcagaatacccaccagcaggatcatcaccggcgcaataattgcgctccacataccaccggccccgaagaggccccagaataccggttcgtcagaacgctttggatttggattaatcatctcaggntccttaccagtacagggcaacaaacaggattacgatggtggcaaccacagttaccgcccagagacttttgataattggctctggtcccattttttcgtcttttacaatgatattggccgctttcggtgccagttcaaaccaggttttggtgtgcagcagagctgncgccagagtgatcaggttaatgatcacaataaccgggttttgtaaaaagtcgacgaatcccgcccaggcttccgggccatttttcagggcaaacagcccgaaaatcagttcaatgctgaaccacacagccggaaccgccgtgccttcgcgcagcatgtaaaagcgataaaacggcaattttttccaccaggtggacgtcattggccgtacatacggtttacgtttagtcgtcatgttgcactccttagcgtggtttcagggtcgcgataagaaagtctttcgaactttctactttgccctgctgaatggccgcagccggatcgacgtgtttcgggcagacttcggagcagtagcccacgaaagtacagctccatacgccgttctggctgttcaactgcgccatacgctccttcttaccgtggtcgcggctatcttcgttataacgatgcgctagcgtaatggcagccggaccgatgaactctgggttcaggccaaactgcgggcacgcggcgtagcacagaccacagttgatgcaaccggagaactggtgatacttcgccatctgcgccggggtctggatgttagtaccctgatccgcggtgcgggagttgccgatgatgtacggtttgatcgcttccagactttcgatgaagtgggtcatatcgaccaccagatcgcgttcaatcgggaagttagctaacgcttcaaccttcataccgtcggtgtaatcacgcaggaaggttttacatgccagttttggcacgttgttaaccatcatgccgcaggaaccacaaatcgccatacggcaggaccagcggtagctcaggtccggtgccaggttgtctttgatgtagcccagcgcatccagtaatgaggtagttgcgtcataaggcacttcatagaatgcgctatgcggtgcggtatcgacttccgggttatagcgcaccacctcaattttcaggtttttcatctcagccattcgccttctccttcttattggctgcttccgccttatcggctgcatccgcttcgccaccgtaaacgcgtttagctggcggtagcgtagtaatcttcacgtcgctgtactccaggcgagtcgtgccatcagcatcgcggaaggcgagggtgtgtttgaggaagttgacgtcgtcacgctcggtgcaaccttcgtccagacgctggtgtgcgccgcgggactctttacgtgccattgcggagtgcgccatacattcagcaacgttcagaccgtggcccagttcaatggtgtagagcaggtcggtgttgaacacgctggaagtgtcggtgatgcgcacgcgcttgaagcgttcctgcagctctgccagcttgtcgatggttttctgcatcagttccggcgtacggtagataccgcaaccttcttccatagccaggcccatttcgtcgcggatcttcgcccagttttcgccgccatcctggttaaccagatctttcagacgttgttcaacgccagctgcctgcgcttcaattgccgcttcgttgccattaccggcagttgctgcacgctctgtcgcttgttcaccggccagacggccgaagaccaccagttccgccagggagttggagcccagacggtttgcaccgtgcagaccaacagaggaacattcacccacggcgaacagacctttaatgcgggtttcacagttctgatcggtttcgataccgcccatggtgtagtgtgcggtcggacgtaccggaatcggttctttaaccggatcgacgccaacgtacgctttcgccagttcgcagatgaacggcagacgttcatgcagttttttctcgccgaggtgacgcaggtcgagataaaccacatcaccacgcggcgtggagatggtgttgcctttacgccattcgtgccagaaggcctgagaaactttgtcgcgtggacccagttccatatatttgtttttcggctcgcccagcggagtttccgggcccatgccgtaatcttgcagataacggtagccatttttgttgaccagaataccgccttcaccgcggcaaccttcggtcatcaggataccggaacctggcagaccggttgggtgatactgaacgaattccatgtcacgcagcggaacgccgtggcttagcgccatacccataccgtcaccggtaacgatgccgccgttggtgttgtaacgataaacgcgacccgcaccgccagtagccataacgaccgcgttagcacggatctgcaccagcgtgccttccatcatgttcattgctaccaggccgcgaacatgaccatcatcaaccagaatatccagcacgaaatgttcgtcaaaacgctggatctgcgggaattgcagagaggtctggaacagcgtgtgcagcatatggaagccggtcttatcggcggcgaaccaggtacgctcgattttcatgccgccgaagcgacgtacgttgacgctaccatccgggcgacggctccatgggcacccccacagttccagttgggtcatttcggttgggcagtggtggacgaaataatccacgacatcctgctcacacaaccagtcgccacccgctactgtatcgtgaaagtgatattcgaagctgtcatgctcctgcgcgacagcggcggagcccccttctgcagcaacggtatggctacgcatcgggtatacttttgagattagtgcgatttttgcatttggatttgcctgcgcggcagcaattgcagcacgtaatcccgcgccaccggcgcctacaatggcaagatcggcttgaaaggtttgcacgacattcctccagattgtttttatcccacagccccgtacttcagggtaagtgcctgaaagttacggtctgcgaacgctattccactgctcctttataggtacaacagtatagtctgatggataagtctgaaatttgacgagatcgatttttttagtgcgcaagagggctaaattatcactgaagatgattaatttaattactaaaccatcagatcgtgctttttttagtcactgcccaccgttgttttattcctgcgtaaaatttgtctcgccgtcgcgttgcgagtagacttcgtgcccttgtcaaaaactggagatttaactatgagcgaaacggcatcctggcagccgagcgcatccattcctaacttattaaaacgcgcggcgattatggcggagatccgtcgtttctttgccgatcgtggagtgctggaggtggagacgccttgtatgagccaggcgacggtaaccgatattcatttggtcccgtttgagacacgtttcgttggccccgggcattcgcaggggatgaatctctggttaatgaccagcccggaataccatatgaaacgcctgctggttgccggttgcgggccggtattccagctgtgccgcagtttccgtaatgaagagatggggcgttatcacaaccctgagttcactatgcttgagtggtatcgaccgcactatgatatgtaccggttgatgaacgaggtggacgatctcttacaacaggtgctggactgcccggcagcagaaagcctttcttatcaacaagctttcttgcgttatctggaaattgacccgctctctgccgacaaaacgcaactgcgggaagtggcagcgaaactggatttgagcaatgttgctgataccgaagaagaccgcgacacgttgctacaattgctgtttacctttggcgtagaaccaaatattggtaaagaaaaaccgacctttgtgtaccactttccagccagccaggcatcactggcgcaaatcagtaccgaagatcatcgggtcgctgaacgctttgaggtttattataaaggtattgagctggcgaatggtttccatgaattgacggatgcccgtgagcagcaacaacgctttgaacaagataaccgtaagcgcgcggcgcgcggtttgccgcagcaccccattgatcagaatctgattgaagccttgaaagtcggtatgcctgactgttccggcgtggcattaggtgttgatcgtctggtgatgttggcgctgggcgcggagacactggctgaagtcatcgcctttagcgttgaccgggcataattctgaaaaattactgaattaacagcgaagaatggcgtgataagcgccattctgtagcatatgttttcatttttccgctaaaggccacaatttaagactggatatttgatatcatccaggtatcaattctgtattggtttttacgctgcccgctcaatgttgggcagtgcagttcagtgggcgcgttttatacacgcgctgaaatgaaggatggtttcatgcctcacacgataaaaaagatgagtctgataggactcatattgatgatctttacttccgtatttggatttgccaatagcccatcggcttattacttaatgggttatagtgcgattcccttttatatattttctgcattgttattctttattccattcgccttaatgatggctgaaatgggagctgcttatcgcaaagaagaaggcggtatctattcctggatgaataatagtgtcggaccacgttttgccttcattggtacgtttatgtggttttcctcttatatcatctggatggtgagcacctccgcgaaagtttgggtaccgttctcaacattcctctatggtagcgacatgacccagcactggcgtattgccggactggagcctacgcaggtggttggtctgctggcagtggcatggatgattctggtcaccgtcgttgcttcaaaggggattaataaaattgcccgcattactgcggtgggcggtattgcagtaatgtgtctgaatttagtattgctgttagtaagcattactattttgttattaaatggtgggcatttcgcgcaggatattaatttccttgcatcaccgaacccaggttatcagtccggtctggcaatgctatcgtttgtggtatttgctatttttgcctatggcggaattgaagcggttggtggtctggtcgataaaacggaaaatccagaaaagaactttgccaaaggtattgtttttgccgctattgttatttcaatcggttattcgctggcaatatttttatggggcgtcagcacaaactggcagcaggtattaagtaatggttccgttaacctcggcaatattacctatgtgctgatgaagagcctcggggtgacgctgggtaacgcactgcatttgtcacctgaagcgtcattgtcgctgggcgtatggtttgcgcgtattaccggactttcgatgttcctcgcttataccggtgcgttctttacgctttgctattcaccgctgaaagccatcatccaggggacgccgaaagcgttgtggccggaaccgatgacgcgcctgaatgcgatggggatgccgtctatcgccatgtggatgcagtgcgggttggttactgtcttcatcctgctggtttcgtttggtggcggtaccgcatcggcgttctttaacaagctgacgctgatggcgaacgtgtctatgacgcttccttacctgttcctcgcgctggctttcccattctttaaagcacgtcaggatctcgacagaccatttgtgattttcaaaacgcgtatgtcggcaatgattgcgacggtggttgtcgttctggtggtgacatttgcgaacgtcttcaccattattcagcctgtggttgaagccggagactgggacagcacattgtggatgattggcggccctgtcttcttctcgctgttagcgatggcgatttaccagaactattgcagtcgcatggcgaataaacctgagttagctctcgactgatcatatgaaatcctgcaactcatcgtctctccggcgatgagttgtcaggaagtaatgcgtatggatgatactctccagggccggtgataactgaagatgatgttaagctgctaaatgagccacgttgacatcatttggcagcttcatgcattacaaacttcccgcctgacgacctttgcccgcagacgtcagcgttctccccgtttgtttaccgttgaggctttccagacgcatctggaagggcgggaatggcatatcgataccgtgggcatggaagccagccagaatcagctggtggatctcatggcgtagcggcatacggtgacccatctcagcggcgtaaatacgcagctcgaaaatctgaatcccctgttgcagatccaccaggaagacttccggtgccgggttgtcgatcaccagcgagcagcgacgcgctgcggtgagcaggatttccgtcacttcttcactgttggcatcggcaggggccggaatcgtcaacaccacgcgcgtgaccgagtcagagagcgaccagttgataaactgctcggtaataaacgccttgttcggcacgattatctctttacggtcccagtcgctgatggtggttgcgcgggtattaattttcgtcacgctaccagtaagatcgcgaattgtcaccgtatcgccaatgcgaatcggtttttcgaacaggatgatcaggccagagataaagttggcgaaaatttcctgcaaaccaaaaccgagaccaacaccgagcgcggcgaccagccactgcaatttcgaccactcaataccaatcatcgagaagccgaccagcccgccaatcagcatcagcagatatttggtgatggtggtgatggcgtagccggtacccggcgttaaatccaggtgctgcaaaatcgccagttccagcagcgcgggcagattgcgcaccagctgcgtggtgatgataaacaccagaatggcaatcagcaccgcaccgagggtaatcggctccagactttctacgccctgtaccgtggaggtgacatcccacagcgaaatattttcgaggaagccgaaagcggaatggatttctgaccacagcacaatgaccgaaagcagggcgatcaacatcaaaattgagcgcactagccgcaaggactgcgcactgatggcatcgagatcgacttcgctttcatcgacttcaattgccccttccgggctactgtgatgatgtgcttcctcttcgccacgcgcacgttgcgctaacatctctgcccggcgatgcttcgcccggtcaaacgccagcctgcgtcgttggatcagcatccagcggcggataacgtgataaaccaccagtagcaggaaccagatggcaaccgaggtttcaagcctcgctaacagcgcctgtgccgttgccagataacccaccgcngacgccagaatggcaaccagtggcgcgccaatcatcatgttccacaacatatggttggtaatattgtcgccgctgccttctttgttgagatacagcgggatcccggcctttttcaggctgagggtgaccaccgccagcgcaccgcaaatgaggataaagcaaagccgtcccagcgaaccggaaaattcgcggtcgtcgaggttatcgaacatcatcagcgccataatcagtggcacaataagcccgatgctcatcaggtagtagcgcatcccacgagaaacacgttcgcgcggccagccaaaatgagcgataaacaagccgttcgggcgggcaaaggtagcgcaaatcatcactacccacagcagcggcacggtggctgtgacgccatcaccaatcgcgaccgccagcggataaggccacgcctcgcgcaagccgtaacccagcgtcatccacagcaccggcagcggtgacgcgacgagaatcgaccagaaaagagtgcgcaacgtcagccagaagtgatcctgagtcactttgccgactttcgccgccgaacgttcaagaaaacgggtgaaatagcggcgcgagtaaatactgcaaccgaccagaatcaacgcgccaaacagcggcaaaatcgtctctttgctggtcagcatcatcacactggctttgcccaactgactgaaggtgtccagcgaaatgagacgacgcagatcctgggcgatttccagcggccaggcgatggtcatcgggcgcacgtcagaggtccagaacagatagcggtgggtcgcttcgttcacttctttcagcgcatcttccagttgcccgttggagactttcagcttggtcagttccagcagtagcgtatcgccaccctgcaacaatgagttcagcaactcacgctgagtgcgtagctgtgcttccagaatacggttttgctcagcggtcagcggctgaccgtcggcctgatgaatttgccgtagcagcggctgtttattaagcagatcctcataacgtaaccgttgcacacgcaactgcgccatttcggtatcaagctgttgtggtttcggcatttccggcagccgtgccacctgcgcccgcaacgcttcaccgagcagattggacgatcccagccattgcgactgttcacgcagcgtattcaacgcctgccggacctgtaacgtctggctggcagcctgacgctgttgcgaggcaacgagatccatccgctgcgcctgttgattcagcgccgccgatagttcgcggttaattttgaattgcgcgacgatatctttcggcaaatcggcactgttttctgctagtaattcggtactttccagcgcccgctctgcctcaagctggcgttggctgttcaattgattacgcaaggcctgcaaatacgcatccagttgctggctctctttttcagccagctcagagcgcaagcgcgctaattcctggcggttattggcagacagctgcgccagctccagttcatcaacgagcgccttaagacgtgcagagtcagactgcaacgcgaaattttgtgcctgattgagcggagtattgccggtaagcgtccccaggcggcgctcgatctcatttaactgacggcgggcgtcggtttgctgttgcggcagttgattcagcgaatcggcaatctcgcgggcgcgctcctgctcttgctgggcctgacggcttttatccagcaactgactgctgacctggagaatttcctgattcagcgcgtcggtagacatccccggcgacacgctgcgcggctcgtcacgcatgttgtttaattgtgcgcgcagagtagcggagagtttcggataattatcaatgacttcttgatattgcttgatgcgctcaagggaaccttttcgttcctcaagcgcatttaaggcagactggagtgcctctacgacttctggctgcgcgggtttcgccgcttttgcctgctccagttcctgggtgatttgtttgctatcgggggccgtcgcggnnnncgccccccaactgaggcaccaggccatcagaaaagtgataatcaggcgcacgtcagcgtttcctttgatggattagacctggtcttttttatcgtcaaccaatgggctggcgtcgtgttctgcttcgatctcttcagcaggaagcggggcgggttcagcgtctggcgtaacaaaggtttcggtagatactgccagcggctggccaattttcgtgacagacaggctttccagttgctcaaccagattcactttacccggtgcaaacaggttgataacggtagagccaagtttaaagcgacccatttcctggcctttcagcagcgccacagaaccgtcgttttccccggcaggccaggtccagcgcttgatgatgccttcgcgcggcggcgtaatggtgcccgcccagaccgtctcaatgctgcctacaatcgtcgccccgaccagaatctgcgccattgggccaaattcggtatcgaacaggcagatcacgcgttcgttacgggcaaacagattcggcacgttctgagccgtgagatggttaacggagaagagatcgcccggcacgtagatcatctcacgcagaataccgttgcacggcatgtgtacgcggtggtagtcacgcggggagaggtaagtggtcacaaacgtaccgttgcggaacaggtccgccatcagatagttgcctgccagcagggcttcgaggctgtagttgtggcctttggcttgcaggattttatcttcttcgattttacccaactggctgataacgccatcggcaggcatgaccaggacattcggatcggtatcgattgggcgtacttcgtcacgcagcggacggacaaagaattcgttaaaggtgcggtagctggcggtgtccggcttttgcgcctctttcatgtcgaccttgtagtatttaacgaacagatcgataaccagttttgtcagccatcctgcccgcttgcttgcgccccaacccgccaggcgagtaagccatagtttcggcagaatgtactgtagcgaaagtttaaatgaatttaacaaggtagcctccaggccattgttttgtcgttcctgatccggcctaaatgccggatcctgaaaaaaaggggacgattctaacgacggttagcttaattgtcagtcatccgtatcagaaaagtttttacgcgtttttacctgcgccatgctttccagaatacggtgatagttttcgaaacgggtttccgcgatttttccttcctcaaccgcttcccggatagcgcagcccggatcggtatcgtgtttgcaatcgcgatatttacacagacctaaatagtcatggaattcgacaaagccctgagtgatttgttccggctccaggtgccagaggccgaactcacgcacaccaggggaatcaatcacatcaccgccgtgcgggaagtgatacaggcgtgcggcggtcgtggtgtgctgaccaagccccgagttgtcagagacatcgttggtcaggatctctttttgcagccccagcaacgcgttcagcaggctggatttgccgacgccagactgcccggcaaaaatgctgatgcgcccggtcaacgcctcttccagcggttttagcccatcctgagtatggctggaaaccatcaatacgcgataaccgatattgcggtagatatccatctgttcgttgacgaacgccatgccttcgtcgtccagcaggtctatcttgttgagcacaataatcggctcaatctgcaaggtttcgcaggccaccaggtaacggtcgataatattgagcgacagctccggcaaaatggcggagacaatgacaatctggtcgatgttggcggcaataggtttcacgccgtcgtagaaatccggacgcgtcaacactgaggtgcgctcatgcaccgcttccacgatccctttgacatttacgccttccgccgccggtttacccggacgccagactacgcggtcgccggtcaccagcgaacggatggtacggcgaatattgcagcggtgaacgtcgccatcggcggattccacatcagcgtgcataccaaagcggctgatgacgataccttcatcaggctcgccaaacagattgtcgtcgtagtcgggcttctccttagacgttttaagacgacgctggtgattggcgttcacgcggcgctgctggcctttggagagtttatttttactcaatcgtactgactcctggtcgcccctgatgggcaaaacatctatgatacacgcaattgtggatcaatatagtcactgtgaatgggtggaaaatagcatgagtgccaatgaaaacaacctgatttggatcgatcttgagatgaccggtctggatcccgagcgcgatcgcattattgagattgccacgctggtgaccgatgccaatctgaatattctggcagaagggccgaccattgcagtacatcagtccgatgaacagctggcgctgatggatggctggaacgtgcgcacccataccgccagcgggctggtggagcgcgtgaaagcgagcacgatgggcgatcgtgaagctgaactggcaacgctcgaatttttaaaacagtgggtgcctgcgggtaaatcgccgatttgcggtaacagcatcggtcaggatcgtcgcttcctgtttaaatacatgccggagctggaagcctacttccactaccgttatctcgatgtcagcaccctgaaagagctggcgcgccgctggaagccggaaattcttgatggttttaccaaacaggggacgcatcaggcgatggatgatatccgtgaatcggtggcggagctggcttactaccgcgagcattttatcaagctgtaaaatttttgctggtcacgtaagcgccggaatccacttgcggcggcgtgattttgacgctaaattgaacgtcttgctgataatttcagcacttgaganaaaaactcaaaaaaannnttttaggggggttgcagagggaaagatttctcgtataatgcgcctcccgtaacgacgcagaaatgcgaaaattacgaaagcaaaattaagtagtacgcgggaatagctcagttggtagagcacgaccttgccaaggtcggggtcgcgngttcgagtctcgtttcccgctccaaaatttgaaaagtgctgcaaagcacagaccacccaagcgggnnnnnnnnnnnnnnnnnnnnnnnaccttgccaaggtnngggnnnnnnnnnnnnnnnnnntttcccgctccaaaatttgaaagtgctgtaaggcacagaccacccaagcgggaatanntcagttggtagagcacgaccttnncaaggtcggggtcgcgagttcgagtctcgtttcccgctccaaattcttctctcaataaaatatccacagcgacgcgatgcgttattgctggtttttgttgtctctgacaaactcttgtaaacagagttatccacagcctcaggccgtaatcttaatttcaaagaaacttcgcacggtgaatagtatttttttaacctattgatagataatttaaaaattaagatttcgttttgtcgagtcgatcacttgacgattttattcgtcttgaattgcaatgcgtttttatttttattcacaagctgtggatgaatcaggcgtcacgcggtaaccctttttcaattacccgaaccagacgctgttttttcggcaattgcacttcgactatgcacgcatttcgcctctcgatttgctgcgccatcgcccacgctatgtgctcatcaagaagtgggtgctcacctttgcgactctcgagcgccgccagaatcgtttcatcccagggcgcattgcctaatgccacggcgatattacgcagccagcgcaggtgacctatacggcgaatcgccgaaccttccgtgacttttaaaaacttctcttcgctccaggcgaataactcaatgagttccggtgcgtgtagcggcttacgcgggctgaaatcgtcttctgtagtgagttgtgaatagcgattccacgggcagataagctggcagtcatcgcaaccgtaaatacggtttcccattaacggtcgcaactcttccgggatcgccccttccagttcgatggtgagataagagatacagcggcgagcatcgacggtatatggctcgacgatggcaccggtcgggcaaatcgtcatacaggccacgcatttgccgcatccttcctcgactggttgatccacgggcagcggaatatcgaccagcaattcgcctaaaaagaagaacgaaccggccttgcgattgaggataagtgagtgcttacctgtccagccgagcccagctttttcagctaacgggcgctcgagaataggcgcagaatcgacaaacggtctaaaattcagcgaaacacaatgttgctgaatcatctcgcccagctttttgagtcggttgcgcagaagtttgtgatagtcacggcccagcgcataacggctaacatagccgagtttggggtttttcagcgtgctggcaaatgcggcgttagcaggaaggtaattcatccgcacgctgatcacgcgcagcgtaccgggcaataactcatgggggcgagcgcgcagcataccgtgacgtgccatccagtccatttcgccgtggtattgtttgtccagccatgcttgcagtttgggctcggactcgctgagatcggtatcggtaatacctacctgctgaaagcccagttccagcccccactgtttaattttttgcgctaactgattgagatcgaggggctctgacatgacggaccatacaatgaagaaaaaccccgtaagtataccacacaccgtctggcacgccgacgatatccgccgcggagaacgcgaggcggcagatgcgctggggctcacactctatgagctgatgcttcgcgctggcgaggccgcattccaggtgtgtcgttcggcgtatcctgacgcccgccactggctggtgttgtgcggtcatggtaataacggcggcgatggctacgtggtcgcgcgactggccaaagcggtcggcattgaggtcacgttgttggcccaggagagcgacaaaccgttgccggaagaggccgcgctggcacgcgaggcatggttaaacgcgggaggcgagatccatgcttcgaatattgtctggcccgagtcggtagctctgattgttgatgcgctgctcggtaccggcttgcagcaagcaccccgcgaatccattagccagttaatcgaccacgctnattcccatcctgcgccgattgtggcggttgatatcccttccggcctgctggctgaaaccggcgctacgccaggcgcagtgatcaacgccgatcacaccatcacttttattgcgctgaaaccaggcttgctcactggaaaagcgcgggatgttacaggacaactgcattttgactcactggggctggatagctggctggcaggtcaggagacgaaaattcagcggttttcggcagaacaactttctcactggctgaaaccgcgtcgcccgacttcgcataaaggcgatcacgggcggctggtgattatcggtggcgatcacggcacggcgggggctattcgtatgacgggggaagcggcgctacgtgctggtgctggtttagtccgagtactgacccgcagtgagaacattgcgccgctgctgactgcacgaccagaattgatggtgcatgaactgactatggactctcttaccgaaagcctggaatgggccgatgtggtggtgattggtcccggtctgggccagcaagagtgggggaaaaaagccctgcaaaaagttgagaattttcgcaaaccgatgttgtgggatgccgatgcattgaacctgctggcaatcaatcccgataagcgtcacaatcgcgtgatcacgccgcatcctggcgaggccgcacggttgttaggctgttccgtcgctgaaattgaaagtgaccgcttacattgcgccaaacgtctggtacaacgttatggcggcgtagcggtgctgaaaggtgccggaaccgtggtcgccgcccatcctgacgctttaggcattattgatgccggaaatgcaggcatggcaagcggcggcatgggcgatgtgctctctggtattattggcgcattgcttgggcaaaaactgtcgccgtatgatgcagcctgtgcaggctgtgtcgcgcacggtgcggcagctgacgtactggcggcgcgttttnnaacgcgcgggatgctggcaaccgatctcttttccacgctacagcgtattgttaacccggaagtgactgataaaaaccatgatgaatcgagtaattccgctccctgatgagcaggcaacattagacctgggcgagcgggtagcgaaagcctgcgatggcgcaaccgtaatctatctgtatggcgatttaggcgcaggtaaaaccacctttagccggggctttttacaggctttgggccatcagggtaatgtcaaaagccccacttatacgctggtcgaaccctatacgctcgacaatttaatggtttatcactttgatttgtaccgccttgccgatcccgaggagctggagtttatggggatccgcgattattttgccaacgatgccatctgcctggtggagtggccacaacaaggtacaggtgttcttcctgacccggatgtcgaaatacacattgattatcaggcacaaggccgtgaggcgcgcgtgagtgcggtttcctctgcgggtgaattgttgctggcacgtttagccggttaacctttgaaaggtggtgggatgatgtatcgcatcagaaattggttggtagcgacgttgctgctgctgtgcgcgcaggtgggtgccgcgacgctctctgatattcaggtttctaacggcaaccaacaggcgcggataacgttgagttttattggcgatcctgattatgcgtttagccatcaaagcaaacgcaccgtggcgctcgatatcaaacaaacgggcgtgattcagggactgccgttgttgttcagcggtaataatctggtgaaggcgattcgctccggaacgcctaaagatgcacaaacgctacggctggtggtcgatcttaccgaaaatggtaaaaccgaagcggtgaagcggcagaatggcagcaattacactgtcgtctttacgattaacgccgatgcgccgccaccgcctcctccgccgcctgtggttgtgaaacgcgttgaaacgcctacggttgtcgcaccgcgcgtcagcgaaccggcgcgcaatccgtttaaaacggaaagtaaccgcactacgggtgttatcagcagtaatacggtaacgcgtccggcagcgcgcgcgacggctaacactggcgataaaattatcatcgctattgatgccggacacggcggtcaggaccctggcgctatcggccccggtggtacgcgggagaaaaatgtcaccatcgccatcgcgcgtaaattgcgtactttgctcaatgacgatccgatgtttaaaggcgttttaacccgtgacggggattactttatctcggtgatggggcgcagcgatgtggcacgtaagcaaaacgccaatttcctcgtgtcgattcacgctgatgccgcaccgaaccgcagtgcgactggcgcttccgtatgggtgctctctaaccgtcgcgccaacagcgaaatggccagctggctggagcagcacgagaaacagtcggagctgctgggcggggcgggtgatgtgctggcgaacagtcagtctgacccctatttaagccaggcggtgctggatttacagttcggtcattcccagcgggtagggtatgatgtagcgaccagtatgatcagtcagttgcaacgcattggcgaaatacataaacgtcgaccagaacacgccagccttggcgttctgcgctcgccggatatcccatcagtactggtcgaaaccggttttatcagcaacaacagcgaagaacgtttgctggcgagcgacgattaccaacaacagctggcagaagccatttacaaaggcctgcgcaattatttccttgcgcatccgatgcaatctgcnccgcagggtgcaacggcacaaactgccagtacggtgacgacgccagatcgcacgctgccaaactaaggacgattgatgccaattcaggtcttaccgccacaactggcgaaccagattgccgcaggtgaggtggtcgagcgacctgcgtcggtagtcaaagaactggtggaaaacagcctcgatgcaggtgcgacgcgtatcgatattgatatcgaacgcggtggggcgaaacttatccgcattcgtgataacggctgtggtatcaaaaaagacgagctggcgctggcgctggcgcgtcatgccaccagtaaaatcgcctctctggacgatctcgaagccattatcagcctgggctttcgcggtgaggcgctggcgagtatcagttcggtttcccgcctgacgctcacttcacgcaccgcagaacagcaggaagcctggcaggcctatgccgaagggcgcgatatggacgtgacggttaaaccggcggcgcatccggtgggaacgacgctggaggtactggacctgttctacaacaccccggcgcggcgcaaattcctgcgcaccgagaaaaccgaatttaaccatatcgatgaaatcatccgccgcatcgcactggcgcgtttcgacgtcacgatcaacctgtcgcataacggcaaaatcgtacgccagtaccgcgcggtgccggaaggcgggcaaaaagaacggcgcttaggcgcgatttgtggcaccgcttntctcgaacaagcgctggcgattgaatggcaacacggcgatctcacgctgcgcggctgggtggccgatccaaatcacaccacgcccgcactggcggaaattcagtattgctacgtgaatggtcgcatgatgcgcgatcgcctgatcaatcacgcgatccgccaggcctgtgaagacaaactgggggccgatcagcaacctgcatttgtgttgtatctggagatcgacccgcatcaggtggacgtcaacgtgcaccccgccaaacacgaagtgcgttttcatcagtcgcgtctggtgcatgactttatctatcagggcgtgctgagcgtgctacaacagcaactggaaacgccgctaccgctggacgatgaaccccaacctgcaccgcgtcccattccggaaaaccgcgtggcggcggggcgcaatcactttgctgaaccggcagttcgtgagccagtagctccgcgctacactcctgcgccagcatcaggcagtcgtccggctgccccctggccgaatgcgcagccaggttaccagaaacagcaaggtgaagtgtatcgccagcttttgcaaacgcccgcgccgatgcaaaaaccaaaagcgccggaaccgcaggaacctgcacttgcggcgaacagtcagagttttggtcgggtactgactatcgtccattccgactgtgcgttgctggagcgcgacggcaacatttcacttttagccttgccagtggcagaacgttggctgcgtcaggtacaactgacgccgggtgaagcgcccgtttgcgcccagccgttgctgattccgttgcggctaaaagtttctggcgaagaaaaatcggcattagaaaaagcgcagtctgccctggcggaattgggtattgatttccagtcagatgcacagcatgtgaccatcagggccgtgcctttacccttacgccaacaaaatttacaaatcttgattcctgaactgataggctacctggcgaagcagtccgtattcgaacctggcaatattgcgcagtggattgcacgaaatctgatgagcgaacatgcgcagtggtcaatggcacaggccataaccctgctggcggacgtggaacggttatgtccgcaacttgtgaaaacgccgccgggtggtctgttacaatctgttgatttacatccggcgataaaagccctgaaagatgagtgatatcagtaaggcgagcctgcctaaggcgatttttttnnnngggccgacggcctccggtaaaacggcgttagccattgagctgcgtaaaattttaccagtagagttgataagcgttgattctgcccttatttacaaagggatggatatcgggacggcgaagccgaacgctgaagagttactcgccgcgccgcaccgattgctggatattcgcgatccgtcgcaggcttactcggctgctgattttcgccgcgatgcgctggcggaaatggccgatatcaccgcggcggggcggatcccactgttagtgggcggtacgatgttgtatttcaaggcattgctggaagggttgtcgccgctaccgtcggcagacccggaagtacgggccagaattgagcaacaggcggcagagcaaggttgggagtcattgcatcgtcaacttcaggagatcgatccggttgcggcagcaaggattcatccaaatgatccacaaaggctttcccgggcactggaagtttttttcatttcgggtaaaactttaacggaactgacgcaaacgtcaggagacgctctaccgtatcaggtgcatcagttcgccatcgccccggcgagccgtgaactgctccatcaacgaattgagcagcgttttcatcagatgttggcttcaggttttgaagcagaagtccgggcgctttttgcccgaggagatttgcatacggacttgccttccattcgttgcgtgggttatcgccagatgtggtcttaccttgaaggcgaaatctcatacgatgaaatggtttatcgaggtgtttgcgccacgagacagttggcgaagcggcagataacctggctgcgtggttgggaaggggttcactggcttgacagtgaaaaaccagaacaggcgcgtgacgaagtattacaggttgttggtgctatcgcaggctgaatgtgtacaattgagacgtatcgtgcgcaattttttcagaatcgaaaggttcaaagtacaaataagcatataaggaaaagagagaatggctaaggggcaatctttacaagatccgttcctgaacgcactgcgtcgggaacgtgttccagtttctatttatttggtgaatggtattaagctgcaagggcaaatcgagtcttttgatcagttcgtgatcctgttgaaaaacacggtcagccagatggtttacaagcacgcgatttctactgttgtcccgtctcgcccggtttctcatcacagtaacaacgccggtggcggtaccagcagtaactaccatcatggtagcagcgcgcagaatacttccgcgcaacaggacagcgaagaaaccgaataaggtttcgggctgttttttttacacggggagccagcgatcctgcgttccccgctgatctatttagagggttatacgcttgtttgaccgttatgatgctggtgagcaggcggtactggtacacatctattttacgcaagacaaagatatggaagacctccaggagtttgaatctctggtctcttccgccggtgtcgaagcattgcaggtgattaccggtagccgtaaagcgccgcacccaaagtattttgtaggtgaaggtaaagcagttgaaattgcggaagctgtcaaagcgacgggtgcttcggtcgttctttttgaccatgccctgagcccggcgcaagagcgtaacctggagcgtttgtgcgagtgtcgtgttatcgaccgcaccggccttattttagatattttcgcccaacgtgcgcgtacccatgagggtaagttgcaggttgagctggcgcagctgcgccatctggctacacgcctggtgcgtggctggacccaccttgaaagacagaaaggcgggattggtttgcgtggtccgggtgaaacccagctcgaaaccgaccgtcgtttgttgcgtaatcgcatcgtgcagatacagtcgcgcctggaaagagttgaaaagcagcgtgagcaggggcggcaatcgcgtatcaaagccgacgttcctactgtttcgctggtgggatataccaacgccggtaaatctacccttttcaatcgcatcaccgaagcgcgggtctacgcggcagaccagttgtttgccaccctcgacccgacgttgcggcgtattgacgttgcagatgtcggtgaaaccgtacttgcagataccgtagggtttattcgccacctgccgcacgatctggtggcagcatttaaagccacgttacaagagacgcggcaagccacattgctgctgcatgtgattgatgcggcggatgtgcgtgtacaagaaaacatcgaagcggtgaatacggttcttgaagagatcgacgctcacgagatcccaaccctgctggtgatgaacaagatcgatatgctggaagatttcgaaccgcgtattgatcgggacgaagagaacaaaccgatccgtgtctggctttccgcacagaccggagcggggataccacagctttttcaggctttgacggagcggctttccggcgaggtggcgcagcatacattgcgtctgccaccgcaggaagggcgtctgagaagtcgtttttatcagcttcaggcaatagaaaaagagtggatggaggaggacggcagcgtaagtctgcaagttcgtatgccgatcgttgactggcgtcgcctctgtaaacaagaaccggcgttgatcgattacctgatctaacggcgtagcgtctgaagcgtggagtcatatcctctggcgtcgaaagacaacagggatcaccgcataacaaatatggagcacaaacatggcgtggaatcagcccggtaataacggacaagaccgcgacccgtggggaagcagcaaacctggcggcaactctgagggaaatggaaacaaaggcggtcgcgatcaagggccacctgatttagatgatatcttccgcaaactgagcaaaaagctcggtggtctgggcggcggtaaaggcaccggatctggcggtggcagttcatcgcaaggcccgcgcccgcagcttggcggtcgtgtcgttaccatcgcagcggcagcgattgtcattatctgggcggccagtggtttctataccattaaagaagccgaacgcggcgtggtaacacgctttggtaaattcagccatctggttgagccaggtctgaactggaaaccgacgtttatcgacgaagtcaaaccggtgaacgtggaagccgtgcgtgaactggcagcttctggtgtgatgctgacgtcggacgagaacgtagtgcgcgttgagatgaacgtgcagtaccgcgtcaccaatccggaaaaatatctgtatagcgtgaccagcccggatgacagcctgcgtcaggctaccgacagcgccctgcgtggagttatcggtaaatacaccatggaccgcattctgacggaaggtcgtaccgtgattcgtagcgatactcagcgcgaactggaagagacgattcgtccgtatgacatgggtatcacgctgctggacgtcaacttccaggctgctcgtccgccggaagaagtaaaagcggcgtttgacgatgcgattgccgcgcgtgaaaacgaacagcaatacattcgtgaagcagaagcgtataccaacgaagttcagccgcgtgcgaacggtcaggcgcaacgtatcctcgaagaggcgcgtgcgtacaaggcccagaccatcctggaagctcagggtgaagtggcgcgttttgctaaacttctgccggaatataaagccgcgccggaaattactcgcgagcgtctgtatatcgagacgatggaaaaagtgttgggtaacacccgcaaagtgctggttaacgataaaggtggcaacctgatggttctgccgttagaccagatgctgaaaggtggtaacgcccctgcggcgaagagcgataacggtgccagcaatctgctgcgtctgccgccagcctcttcctccacaaccagtggagcaagcaacacgtcgtccaccagtcagggcgatattatggaccaacgccgcgccaatgcgcagcgtaacgactaccagcgtcagggggaataacgatgcgtaagtcagttatcgcgattatcatcatcgtgctggtagtgctttacatgtctgtctttgtcgtcaaagaaggtgagcgcggtattacgctgcgttttggtaaggtactgcgtgacgatgacaacaaacctctggtttatgagccgggtctgcatttcaagataccgttcattgaaacggtgaaaatgctcgacgcacgtattcagaccatggacaaccaggccgaccgctttgtgaccaaagagaagaaagacctgatcgtcgactcttacatcaaatggcgcatcagcgatttcagccgttactacctggcaacggggggtggcgacatttcgcaagcggaagtgctgttgaaacgtaagttctctgaccgtctgcgttctgaaattggtcgcctggacgtgaaagacatcgtcaccgattcccgtggtcgtctgaccctcgaagtacgtgacgcgctgaactccggttctgcgggtacagaagatgaagttactaccccggcggcagataacgccattgccgaagcggcagagcgcgtaacggctgagacgaagggcaaagttccggtcatcaacccgaacagtatggcggcgctgggtattgaagttgtcgatgtgcgaattaagcagatcaacctgccgaccgaagtgtctgaagcgatctacaaccgtatgcgcgccgagcgtgaagcggtagcgcgtcgtcaccgttcacaaggtcaggaagaagcggaaaaactgcgcgcgactgccgactatgaagtgaccagaacgctggcagaagctgagcgtcagggccgcatcatgcgcggtgaaggcgatgccgaagcagccaaactgtttgctgatgcattcagtaaagatccggacttctacgcattcatccgtagcctgcgtgcttatgagaacagcttctctggcaatcaggacgtgatggtcatgagcccggatagcgatttcttccgctacatgaagacgccgacttccgcaacgcgttaatataacgactgcggtacaggtcaataaagccaccgcatcctcagggatgtcggtggttttctttttctataaggataatgaatgaattcgacaatctggctggcgcttgccctggttttggtactggaaggtttagggccgatgctttacccgaaggcatggaagaagatgatctctgcgatgaccaatttgcccgataatattttacgtcgttttggcggtggacttgtggttgcgggcgttgtggtctactacatgttgaggaanacgattggctgaacaaaaaacagactgatcgaggtcatttttgagtgcaaaaagtgctgtaactctgaaaaagcgatggtagaatccatttttaagcaaacggtgattttgaaaaatgggtaacaacgtcntcgtactgggcacccaatggggtgacgaaggtaaaggtaagatcgtcgatcttctgactgaacgggctaaatatgttgtacgctaccagggcggtcacaacgcaggccatactctcgtaatcaacggtgaaaaaaccgttctccatcttattccatcaggtattctccgcgagaatgtaactagcatcatcggtaacggtgttgtgctgtctccggccgcgctgatgaaagagatgaaagaactggaagaccgtggcatccccgttcgtgagcgtctgctgctgtctgaagcatgtccgctgatccttgattatcatgttgcgctggataacgcgcgtgagaaagcgcgtggcgcgaaagcgatcggcaccaccggtcgtggtatcgggcctgcttatgaagataaagtggcacgtcgcggtctgcgtgttggcgaccttttcgacaaagaaaccttcgctgaaaaactgaaagaagtgatggaatatcacaacttccagttggttaactactacaaagctgaagcggttgattaccagaaagttctggatgatacgatggctgttgccgacatcctgacttctatggtggttgacgtttctgacctgctcgaccaggcgcgtcagcgtggcgatttcgtcatgttcgaaggtgcgcagggtacgctgctggatatcgaccacggtacttatccgtacgtaacttcttccaacaccactgctggtggcgtggcgaccggttccggcctgggcccgcgttatgttgattacgttctgggtatcctcaaagcttactccactcgtgtgggtgcaggtccgttcccgactgaactgtttgatgaaactggcgagttcctctgcaagcagggtaacgaattcggcgcaactacgggtcgtcgtcgtcgtaccggctggctggacaccgttgccgttcgtcgtgcggtacagctgaactccctgtctggcttctgcctgactaaactggacgttctggatggcctgaaagaggtgaaactctgtgtggcttaccgtatgccggatggtcgtgaagtgactaccactccgctggcagctgacgactggaaaggtgtagagccgatttacgaaaccatgccgggctggtctgaatccaccttcggcgtgaaagatcgtagcggcctgccgcaggcggcgctgaactacatcaagcgcattgaagagctgaccggtgtaccgatcgatatcatctctaccggtccggatcgtactgaaaccatgattctgcgcgacccgttngacgcgtaattctggtacgcctggcagatattttgcctgccgggctaacagtgtgatacattgctgtgtcggttaagccattacgctatccgacacagtgttaaatcctcgcttttttccttccccgaactgaaataaattagcgacacagcttgtggctggtttatcatcaatataaatgtatttttttcccgatttcccttttgaggttgatgtgcagttaacgagtttcactgattacggattacgtgcgctgatctacatggcgtcattgccagaagggcggatgaccagtatttctgaagtgactgacgtctacggcgtctcccgtaatcatatggtcaaaataatcaatcaacttagtcgtgccggctacgngactgctgttcgtggaaaaaatggcggcattcgcctgggtaaaccggcgagtgcgatacgtattggtgatgtggtgcgcgagctggagcccttatcgctggtgaattgcagcagtgagttttgccacattacacctgcctgtcggttgaaacaggcgctttctaaggccgtgcaaagttttcttacggaactggataactacacgcttgccgatttggttgaagagaatcaaccgctttataaattattgctggtggagtgacgaaaatcttcatcagagatgacaacggaggaaccgagatgtcacaagatcctttccaggaacgcgaagctgaaaaatacgcgaatcccatccctagtcgggaatttatcctcgaacatttaaccaaacgtgaaaaaccggccagccgtgatgagctggcggtagaactgcacattgaaggcgaagagcagcttgaaggcctgcgtcgccgcctgcgcgcgatggagcgcgatggtcaactggtctttactcgtcgtcagtgctatgcgctgccggaacgcctcgacctggtgaaaggtaccgttattggccaccgtgatggctacggctttctgcgggttgaagggcgtaaagatgatttgtatctctccagcgagcagatgaaaacctgcattcatggcgatcaggtgctggctcagccgctgggtgctgaccgtaaaggtcgtcgtgaagcgcgtattgtccgcgtactggtgccaaaaaccagccagattgttggtcgctactttaccgaagcgggcgtcggctttgtggttcctgacgatagccgtctgagcttcgatatcttaatcccgcccgatcagatcatgggcgcgcggatgggctttgtggtggttgttgaactgacccaacgcccgactcgccgtaccaaagcggtgggtaaaatcgtcgaagtgctgggcgacaatatgggcacgggcatggcggttgatatcgctctgcgtacccatgaaattccgtacatctggccgcaggctgttgagcaacaggttgctgggctgaaagaagaagtgccggaagaagcaaaagcgggccgtgtcgatttgcgcgatttaccgctggtcaccattgatggcgaagacgcccgtgactttgacgatgcagtttactgcgagaaaaannnnngcggcggctggcgtttatgggtcgcgattgctgacgtcagctactatgtgcgtccgccaacgccgctggacagagaagcgcgtaaccgtggtacgtcggtgtacttcccttcgcaggttatcccgatgctgccggaagtgctctctaacggtctgtgctcgctcaatccgcaggtagaccgcctgtgtatggtgtgcgagatgacggtttcgtcgaaaggccgcctgactggctacaaattctacgaagcggtgatgagctctcacgcgcgtctgacctacaccaaagtctggcatattctgcagggcgatcaggatctgcgcgagcagtacgccccgctggttaagcatctcgaagagttgcataacctctataaagtgctggataaagcccgtgaagaacgcggcgggatctcatttgagagcgaagaagcgaagttcattttcaacgctgaacgccgtattgaacgtatcgaacagactcagcgtaacgacgcacacaagttaattgaagagtgcatgattctggcgaanatctcggcggcgcgtttcgttgagaaagcgaaagaaccggcactgttccgtattcacgacaagccgagcaccgaagcgattacctctttccgttcagtgctggcagagctggggctggaactgccgggcggtaacaagccggaaccgcgcgactacgcggagctgctggagtcggttgccgaccgtcctgatgcagaaatgctgcaaaccatgctgctgcgctcgatgaaacaggcgatttacgatccggaaaaccgtggtcactttggcctggcattgcagtcctatgcgcactttacttcgccgattcgtcgttatcctgacctgatgctgcaccgcgccattaagtatctgctggcgaaagagcaggggcatcagggcaacaccactgaaaccggtggctaccattattcgatggaagagatgctgcaattgggtcagcactgttcgatggcggaacgtcgtgccgacgaagcaacgcgcgatgtgnctgactggctgaagtgtgacttcatgctcgaccaggtaggtaacgtctttaaaggcgtaatttccagcgtcactggctttggcttcttcgtccgtctggacgacttgttcattgatgggctggtccatgtctcttcgctggacaatgactactatcgctttgaccaggtagggcaacgcctgatgggtgaatccagcggccagacttatcgcctgggcgatcgcgtggaagttcgcgtcgaagcggttaatatggacgagcgcaaaatcgactttagcctgatctccagcgaacgcgcaccgngcaacgtcggtaaaacggcgcgcgagaaagcgaaaaaaggcgatgcaggtaaaaaaggcggcaagcgtcgtcaggtcggtaaaaaggtaaactttgagccagacagcgccttccgcggtgagaaaaaaacgaagccgaaagcagcgaagaaagacgcgagaaaagcgaaaaagccatcggcgaaaacgcagaaaatagctgcagcgaccaaagcgaagcgtgcggcgaagaaaaaagtggcagagtgatcattaccctcttcaaacagaagagggttagattgctgacaaaatgcgctttgttcatgccggatgcggcgtgaacgccttatccggcctacataatcacgcaaattcaatatattgcagggatcatgtagaccggataaacgtagtgcatcaggcaaaacgtaaacaacgagtacattaatgagcgaaatgatttacggcatccatgcagtgcaggccctgctggagcgcgcccctgaacgttttcaggaagtctttatttnaaaaggccgtgaagataaacgtctgttaccgctgatccacgcccttgagtcccagggcgtggttatccagttggcaaaccgccaatatctcgacgagaanagcgacggtgccgtgcatcagggcattatcgcccgcgtgaagccaggacgtcagtaccaggaaaacgatctgccggatctgatcgcttcgctcgatcaaccgttcctgctgatcctcgacggtgtaaccgatccgcacaacctcggcgcgtgcctgcgtagcgcggacgctgctggcgttcacgcggtgattgtgccgaaagatcgctccgcacagctcaacgccacggcgaaaaaagtagcctgcggcgcggcagaaagcgttccactgattcgggtgactaaccttgcgcgcaccatgcgtatgtgcaggaagagaatatctggatcgtcggtacggcaggtgaggcggatcatacgctctatcaaagcaaaatgaccggacgcctggcgctggtgatgggcgcggaaggtgaaggtatgcgtcgcctgacccgtgaacattgcgatgagttgatcagcatcccaatggcaggaagtgtttcttccctgaacgtttcggttgcaaccggaatttgcttatttgaagcggttcgtcagcgcagctagttcctctgaattatgaaaagccatccagatttnnatggtttttttttgtctatagctggtaagataattacgtattgcaaatattcattttattaatatttaaacttaatctatatggaataatatatgacatggaatccgttggcgctggcgacggcgctgcaaactgtacctgaacaaaatattgatgtaacaaatagcgagaacgcattaattattaaaatgaatgattatggcgatttgcaaatcaatattctttttacttcccgccaaatgattatcgaaacctttatttgtccggtgagtagtatcagcaatccagatgaatttanncccttcttattaagaaatcagaagatgatgccgttgtcatcggtaggaatctccagcgtacaacaagaagagtattacattgttttcggggcgttatcgcttaaatcttctcttgaagatatcctgcttgagataacctcgctggtagataacgcattggatctggctgaaattacagaagaatattcacactaattacaaggacgggtatttatgggaattttaaaaagtttatttacgctggggaaatcgtttatctcccaggcggaagaatccattgaagaaccccagggtgtgcgcatgctggaacagcatattcgtgacgctaaagctgaactcgataaagccggaaaatctcgcgttgatctgctggcgcgggtgaaattaagtcacgataagctgaaagatttacgtgagcgcaaagccagtctggaagcccgtacgctggaagcgttaagcaagaacgttaatccgtcgttgattaacgaagttgctgaagaaatcgcgcgccttgagaatctcattaccgctgaagagcaagtgttgtcgaatctggaagtctcccgtgatggcgtggaaaaagcagttgcagcgacagcgcagcgtatcgctcagtttgagcagcaaatggaagtcgttaaagccactgaagccatgcagcgtgcacaacaggctgtaacgacttctaccgttggcgcatcttccagcgtttcgacagcagcagaatccttaaaacgcctgcaaacgcgtcaggccgaacgtcaggctcgcctggatgctgccgcacagttagaaaaagtcgcagacggtcgcgaccttgacgaaaagctggcggaagccggaattggcggtagcaataaaagtagcgcccaggatgtattagcaagactgcaacgccaacagggcgagtaatttttttgccagcctcactgcaaggctggcaactattttaaggataaaatatgtntggttttttccagcgtctgtttggcaaggataataagcctgctatcgatcgcggtccgctgggacttcatctcaatagtggctttacgctcgacacgttagcgtttcgtttgctggaagatgaattgctgattgcgctgccgggtgaggaatttacggtagtcgctgtcagccacatcgatctgggcggcggtagtcagattttccgctactacacttcaggcgatgagtttctgcaaatcaataccaccggcggcgaagatattgatgacattgatgatatcaagctctttgtctatgaagagagctacggtatcagtaaagagagtcactggcgcgaggcgatcaacgccaaaacgatgggggcaatgaccttaaactggcaggaaaaacgctggcagcgattttttaacagcgaagaaccgggaaatatcgaacccgtctacatgctggaaaaagtagaaaatcaaaatcatgctaaatgggaagtccataattttaccatgggctaccagcggcaagtgaccgaagatacttacgaatatttgctgctaaatggtgaggaatcttttaacgatctcggcgagccagagtggttattttcgcgcgcgttgggtgtcgatatcccgctgacatcacttcatattattggttaattacaaggacgtttacaatgcatatactggattcacttcttgcctttagtgcctatttttttattggcgtggctatggtgattatttttctgtttatctactccaaaattacaccgcacaatgaatggcaattaatcaaaaacaataataccgcagcgtcactggcgttcagcggtacattgttgggttacgtgatccccttatccagtgcggcaatcaatgcggtgagtattccagactatttcgcctggggcgggattgcactggtgattcagttactcgtttttgctggtgtcagactttatatgcccgcattaagcgaaaaaattattaatcacaataccgcagcaggaatgtttatgggaaccgccgcgctggctggcggtatttttaacgcagcttgtatgacatggtaatggacgatcatggccagaaaacgcaaatcaagaaataacagtaaaattggtcacggagcgatcagtcgcattggtagaccgaataatccttttgaaccgcgtcgcaatcgctacgcacaaaaatacttaacgttggcgctaatgggcggngnnnnnnnttttgtattgaaaggttgtggcgatagtggcgatgtcgataacgacggcgacggaacgttttattcgacagtgcaggattgtattgatgacggtaataatgccgacatttgcgcgcgtggctggaacaacgccaaagcggcattttatgccgatgttccgaagaatatgactcagcagaactgtcagtctaagtacgaaaattgctactacgacaatgttgaacagagttggatcccggtcgtttctggatttttgttaagccgggttattcgtaaagatcgcgatgagccgtttgtctataacagcggcggatcctcatttgcttcccgccccgtctggcgcaacacttccggtgattactcctggcgctccggttctggcaaaaaagantcttactcttcaggcggctttaccaccaaaaaagcgtcaaccgtttctcgcggcggctatggtcgttcttccagcgcccgtgggcattggggaggctaatcatgctgagacacaacgttcctgtgcgacgggatctggaccagatcgccgctgacaacggtttcgactttcatatcatcgacaatgaaatctattgggatgagagtcgggcttaccgttttactctgcgccagattgaagagcagatcgaaaaaccgactgcggaactgcatcagatgtgccttgaggtggtggatcgcgcggtaaaagatgaagagatcctgacgcaactggcgatcccgccgttgtactgggatgtgatcgctgaaagctggcgcgcccgcgatccttcgctgtatggacggatggattttgcctggtgtggcaatgcgccggtgaagctgctggagtacaacgccgatacgccaacttcattgtacgagtcggcttatttccagtggctgtggctggaggatgcccggcgcagcggcattattccgcgtgatgccgatcagtacaatgctattcaggaacgcctgatttcacgctttagcgagctttacagtcgggaaccgttttatttttgctgctgtcaggacaccgatgaagacaggagtaccgtgctgtacttgcaggactgcgcccagcaggcagggcaggagtcgcggtttatctacattgaagatctcggtttgggcgtcggnggcgtactgaccgatcttgatgataatgtcatccagcgtgcatttaagctgtatccgctggagtggatgatgcgtgacgataacggtccgctgctgcgcaagcgtcgcgagcaatgggtggagccgttatggaaaagtatcttgagtaataaagggctaatgccgctgctttggcgcttcttccctggtcatcctaaccttcttgcatcctggtttgagggtgaaaaaccgcagattgccgctggcgaaagctatgtgcgtaaaccgatctactcgcgcgaaggcggaaatgtcaccattttcgacggccagaataacgtcgttgaccacgctgatggtgattacgccgatgaaccgatgatctaccaggcgtttcaacctctgccgcggtttggcgatagctacacactcatcggtagctggattgtcgatgatgaagcgtgcggaatggggatccgtgaagataacacactgatcaccaaagacacctcacgtttcgttccgcattacattgctggataagaatgttttagcaatctctttctgtcatgaatccatggcagtgaccatactaatggtgactgccattgatggagggagacacagtgcactggcaaactcacaccgtttttaatcaacctataccattaaataacagcaacttatacctgtctgatggcgcgctttgcgaagcggtaacgcgtgaaggtgctggctgggatagcgattttctagccagtattggtcagcagttaggaacggctgaatcccttgaactggggcggctggcgaatgtgaatccgcctgaactgttgcgctacgatgcgcaaggacgccgtctggacgatgtgcgttttcaccccgcctggcacctgctgatgcaggcactatgtaccaatcgggtgcacaatcttgcctgggaagaagacgctcgctccggcgcatttgtggnnnnngcggcgcgttttatgttgcacgcacaggttgaggcggggtcgttatgtccgataaccatgacctttgccgccacgccattgttgttacagatgttacccgcgccgtttcaggactggaccacaccgctgttgagcgatcgctacgattctcacttattgccaggtgggcaaaaacgcggtttgttgattggcatgggaatgacggaaaagcagggcggttccgatgtcatgagcaacaccacccgcgcagagcgtctggaggatggctcttatcggctggtggggcataaatggtttttctcagttccgcaaagcgatgcgcatctggtgctggcgcagaccgcgggcggtttgtcctgcttttttgtgccgcgctttttgcctgacgggcaacgcaacgcgattcgcctcgagcggctgaaagataagctgggtaatcgctctaacgccagttgtgaagtggagtttcaggatgccattggctggttattggggcaggaaggggaaggaattcgtctgatcctgaaaatgggggggatgacgcgttttgattgcgccctgggtagccatgccatgatgcgccgtgcgttctcgctggcgatttatcatgcgcatcaacgccatgtttttggtaatccattgatccaacagccccttatgcgtcatgtcttaagtcgcatggcacttcagcttgaagggcaaacggcgttgctgtttcgtcttgcgcgagcgtgggaccnnnnnnncgatgccaaagaagctctgtgggcgcgtttatttacgcctgcggcaaaatttgtgatctgcaaacgaggtatgccgtttgtggccgaagcgatggaggtgctgggcggcattggttattgcgaggagagcgagctgccgcggctttaccgggagatgccggtaaacagtatttgggaaggttccggcaatattatgtgcctggatgtgctgcgcgttctcaataagcaagcgggcgtatacgacttattgtcggaagcatttgtagaagtgaaagggcaggatcgctattttgattgcgcggttcgtcgtttacagcagcagctgcgtaagccagctgaagaactggggcgagagattactcatcagctattcctgctgggctgcggtgcgcaaatgttgaaatatgcttctccgccaatggcgcaggcgtggtgtcaggtgatgttagatacgcgcggcggcgtacggttgtcagagcagatccagaatgatttattgctgcgggcgacggggggagtgtgtgtgtaagcgtatacgactgatgcgacgctggtttcgattaactaaatgaaatatgtgaaaattgtaggccggacaaggcgctcgcgccgcatccggcattgttcatttgctgtagatgacactcatgcatacagtatcgcctgtacgcgccagttatcaggctgctggtcttcgtacatggtaataatgcggtaccatgacgcaccttgttcatcggcctttaacgccacgatacgttccacgtcctgcggatcccctgaaatattgctaactgagatctgacctatttcattcaggcccgtcacgcagtcagcactggcgaattctgcagactgtgccgtggcgctcgcaggataagtcactaattgcagcgagggtgaggcaagtaattgtttcatcgtcagctccatttttcgtttccccacatgttgcagggcattccatcgcggtaataaacgcccaggcttccagccggtaatttattgtgcacaggtaaacgcatagggacgcaaagcaatgtaaagctgactatgtaagttgtctgatttatttacggtacaaaatggcttgtgaataccactgtcctgtcacgatggtttcgtccaccatgacgacaacgtaataatcagcttttgcagcgacagcttttgctctgatttctgctaatgcgtcatccggagaaccccgaaccattgtgcttacgctacctattcgctgtaacccttgcgtctggtcgcggcgaatctcttgcggatggtccgttactggcggtgctggctgtggcgtaccttgcagtgcgctacaggcacttaacatcaacaccaataataaactggcaaaccggtaaataacgctattacgtttcctgctaaccatagtgtagtgccttattaatttaactttgggggaatgttcccgaattgttacctggtacgcgattttcgaatgaaaacgtgacgaaagcgtaacccacatctcaacattatgaactaataccgccagcagaaacttgtgctaaggatttcttcatgtcataccagacaaaaaggagagacagatgattgaaatagaatcacgcgagctggcagatattcccgttcttcatgcttatcctgtcggacaaaaagataccccgttaccgtgcgtgattttttatcacggctttacttcgtccagtctggtgtatagctattttgccgttgcgctggcgcaggctggtttgcgggtgatcatgccggatgcgcccgatcacggtagccgttttagtggtgacgcagcgcggcggttaaatcaattctggcaaatcttgctacaaagtatgcaggaattcactactttacgtgcggcaatagccgaagaaaagtggctgcttgatgaccgtctggcagtcggtggtgcgtcgatgggcgcgatgacggcactggggattaccgctcgccaccccacggtgagatgtaccgccagcatgatgggatcgggctattttacatcactcgcccgttcactgtttccaccgctgatacctgaaacggcagcacagcagaatgaattcaataacattgtcgcgccactggcagagtgggaagcgacaaaccacctggaacaacttagtgacagacctctactgctgtggcatggcctcgacgatgacgttgtgcctgccgacgaatcactacgtttgcagcaggccttaagcgagacgggacgggataaactgctaacctgttcatggcagccaggcgtgcgtcaccgcantacgcctgaggcgttagatgctgccgtgacatttttccgccagcatctttaaacacgcagaatgctgaccccttgcgcttccagttgttgcaggatttccgggttagcatttttgccggtgataagcatatcgatttgatcggcacggctaaaaagcattcccgcgcgttctccaatcttactgctatcaaccagtaccaccagtttccctaccacgctcagcatcttctgctctgccattgctgtcagcatatcggttttatacaacccttctgcggtcagcccttttccgctggtaaacatccagtgcccggcatagagactgttttcgctgccctgcgggcttaaagtgatggactgacttttgttgtactgtccgcccataatgatcacgctgtcatgttcttgatcgatcaggtaatttgccagcggtagataattagtgatgatttgcactggcttgccacacatttcccgcccaagcagaaacgcggtggagccgcagttgatgactacgctttcgcccggattaaccagctgcgaggccgctttagcgatacgtactttttcatcgtgattctgcgcctgatgcagattcatcggcgtccagcgcgggcgctgttgggtaatagcttctgcaccattgcgcacttttttcagtttgccgctttcgtcaagtttattgatatcgcgtcgcgcagtggcaggcgaaattcccagacgctcaacgactttctcaacggtcacaaagcccaattgtgcgagcatttccaggaggatttgatgtctttgtgcttcagtcatgagctattccgataaaatttgatttttttagatgatatttgaaatagccaggaaatactacgccggatagcgcgaacttctccacgctatccggtataaacgacagattacaggaatgacttgaacggcagatccggttcaatagtgaagcaatcatcgaaaccgcgcggatagtggtactcgaagttgtctttatccagcggccaggtaaatttgccgcccacctgccagataaacggcttgaagccatacttcagacgatcttttttcatctcccacagcacgcggatctcttgcggatcggcctggaagtttgaccagatatcgtggtggaacgggataaccactttcgcattcagcgcttcacccatacgcagcatatcggcgctggtcatcttgtcggtgataccgcgcgggttttcgccgtacgatcctaacgccacgtcgatctgatgttcgttaccgtgcttcgcataatagttagagtagtgggagtcgccgctgtgatacagggagccgccaggcgttttgaacaggtagttcaccgcgcgatcgtccatgccatctggcagtacgccagccgctttttgatcggcaggcagggtgatcagtgcagtacggtcgaaagcatcaagcgcatgaatttcaatgtctttcacttttactacatcgcccggtttgaccacgatgcaacgctctttcggtacgccccagccaatccacaaatccacacaggttttcggtccgataaacggtacgtcatcagcacagttctgcatcacggcagcagcgacgttaacgtcgatatgatcgttgtgatcgtgagtcgccagtaccgcgtcgatctggcgaatcgcaaacggatcaagaacaaacggggtggtacgcaggtttggctgcagttttttcacgccagccatgcgctgcatctggtgaccctgtttcattaacgggttaccgtgactttgtttgccagtgccgcaccagaaatcaacgcaaacgttggtgccaccttccgatttcaaccagatcccggtgcagccaagccaccacatcgcaaatgtgccaggagcgacctgttcttgttcaatttcttcattcaaccagctaccccactccgggaaagtgctcaggatccaggattcacgggtgatacttttcactttactcatcgccatttaccttcatgatagttcaattcgaatcaatgtgtgattggttttgattaatcctgacactattttttctggaaggcaatgaccantttttgactttttgccagggaagttgttgttgattttgagtatggaaagatttaatggaatgtataattcaattaactaaatgaatttaaatgaataattgtttcgttgcgtgaatcccgctctatccatgtggaattatttgcgggtcgcgtcacatttaatcataaataatcttgttgtgattacttttgaaaattagagtgagtgcacaacattccgggtgtgtggaatacccggttacctcttcttcaggagatcgttatggagatcctctacaacatctttaccgtattttttaaccaggtcatgaccaatgccccgttgttgctgggtattgtgacctgtctgggctacatcctactgcgcaaaagtgtcagcgttattattaaaggcacgattaaaaccataattggtttcatgttgttgcaggcagggtccggcatcctcaccagcaccttcaaaccggtggtggcgaaaatgtccgaagtctacggcattaacggcgcaatttccgatacctacgcttcaatgatggcaaccatcgaccgcatgggcgatgcctatagctgggtgggttacgccgtattgttagcgctggcactgaacatctgttacgtgctgttgcgtcgcattaccggcattcgcacaatcatgttgaccggccacatcatgttccagcaggccgggttgattgccgttacgctgtttatcttcggctactccatgtggaccaccattatctgtaccgcgattctggtttcgctctactggggcatcacttccaacatgatgtacaagccgactcaggaagtgacggatggctgtggtttctccatcggtcaccagcagcagtttgcatcatggattgcctataaagtcgcgccgttcctcggcaaaaaagaggagagcgttgaanacctcaaactgccgggctggctgaacattttccacgacaacatcgtctccacggcgattgtgatgaccatcttctttggcgccattctgctctccttcggtatcgacaccgtgcaggcgatggcgggcaaagtgcactggacggtctacatcctgcaaaccggtttctccttcgcggtggcgatcttcatcatcactcagggcgtgcgcatgtttgtggcggaactctctgaagcatttaacggtatctcccagcgcctgatcccaggtgcggttctggcgattgactgtgcggctatctatagcttcgcgccgaacgccgtggtctggggctttatgtggggcaccatcggtcagctgattgcagttggcatcctggtcgcctgcggctcttccattctgattattccaggctttatcccgatgttcttctccaacgccaccatcggcgtgttcgctaaccacttcggcggctggcgtgcagcgctgaagatttgtctggtgatgggaatgatcgaaatctttggttgcgtctgggcggtgaaactcaccggtatgagtgcctggatgggcatggcggactggtcgattctggcaccgccgatgatgcaaggcttcttctccatcggtatcgcctttatggccgtcatcattgtaattgcactggcttatatgttcttcgctggccgcgcgnngcgcgcagaagaagatgcagaaaaacaactggcagaacagtctgcttaataaggagttttgattatgaccgtacgtattctggctgtgtgtggcaacggacaaggcagttccatgatcatgaagatgaaagtggaccagtttttaacccaatcaaacattgaccatacggtaaacagctgcgcggttggcgagtacaaaagcgagttgagtggcgcggatatcatcatcgcttctacgcacattgcgggcgaaatcaccgtgaccggcaacaaatacgtggttggcgtgcgcaacatgctctctcctgccgactttggcccgaaactgctggaagtgatcaaagagcatttcccgcaggacgtgaagtaaggacgcgccatgaaattacgtgattcgctggctgaaaataaatccatccgtctgcaggctgaagcagagacatggcaggaagcggtgaaaatcggcgttgacctgctggtggcggcagatgtggtagagccgcgttactaccaggcgattctggatggcgttgaacagttcggtccttatttcgttatcgctccgggcctggcaatgccgcacgggcgtccggaagagggcgttaagaaaaccggtttctctctggtaacgctgaaaaagccgctggagttcaaccacgatgacaacgatccggtggatatcctcatcaccatggcggcggtcgatgccaatactcaccaggaagtgggcatcatgcagatcgtcaacctgtttgaagatgaagagaattttgaccgtttacgcgcctgccgtaccgagcaggaagtactggatctcattgaccgcaccaacgcggcagcttaagaaggaattgaacatgtcattaccgatgttgcaagtcgcgctggacaaccagactatggatagcgcctacgaaaccactcgcctgattgccgaagaagtcgacattatcgaagtgggcaccattctgtgcgtgggcgaaggcgtgcgtgcggttcgtgacctgaaagcgctctacccgcacaaaatcgtactggcagacgccaaaattgccgatgcaggcaaaatcctttcgcgtatgtgcttcgaagccaacgctgactgggtgacggtaatttgctgtgcggatatcaacaccgccaaaggcgcgctggacgtggcaaaagagtttaacggcgacgtgcagatcgaactgaccggttactggacctgggaacaggcgcaacagtggcgcgacgcaggtattcagcaggtggtttatcaccgcagccgtgacgcgcaggccgcaggcgtggcgtggggcgaagcggacatcaccgcgatcaaacgtctttccgatatgggcttcaaagtcaccgtcactggtggcctggcgctggaagatctgccgctgttcaaaggcattccgattcacgtctttatcgcgggccgtagtatccgtgatgccgcttctccggtggaagccgcacgtcagttcaaacgttccatcgccgaactgtggggctaaggagcggatatgttgtccaaacaaatcccgcttggcatctatgaaaaagcgctccccgccggggagtgctggctggaacgcctgcaactggcaaaaacgttgggcttcgattttgtcgagatgtcggtagatgaaacggacgagcgcctgtcgcgcctcgactggagccgcgagcagcgtctggcgctggtgaatgcgattgttgaaaccggcgtgcgcgtgccgtccatgtgcctttctgctcatcgtcgtttcccgctgggcagtgaagatgacgcggtgcgggcgcaggggctggagattatgcgtaaagctatccagttcgcccaggacgttggtattcgcgtgatccaactggcgggctatgacgtttactatcaggaagccaataacgaaacgcgtcgtcgtttccgtgacggcctgaaagagagcgttgagatggcgagccgcgcgcaggtgacgctggcgatggagatcatggattatccgttgatgaactccatcagcaaggcgctgggctacgcgcactatctcaacaatccgtggttccagctctacccggatatcggcaacctgtcggcgtgggacaacgatgtgcagatggagttgcaggccggaatcgggcatatcgtcgcggtacatgtgaaagacaccaaaccgggcgtcttcaaaaacgtgccatttggcgaaggtgtggtggatttcgaacgttgcttcgaaacgctcaaacagagtggctattgcgggccgtacctgattgagatgtggagcgaaacggcggaagacccggcggcagaagtggcgaaagcgcgtgattgggtgaaagcgcgcatggcgaaagcgggcatggtggaggcggcataatgcaaaagctaaaacagcaggtgtttgaagccaacatggatctgccgcgctatgggctggtgacctttacctggggcaacgtcagcgctatcgaccgcgaacgcgggctggtggtgatcaagcccagcggcgtcgcctacgaaaccatgaaagcagacgatatggtggtggtcgatatgagcggtaaggtggtggaaggggaatatcgtccgtcttccgacaccgcgacgcatctcgaactctaccgtcgttatccgtcgcttggcggcattgtccatacccactccactcatgctaccgcatgggcgcaggcggggctggcgatcccggcgttaggcaccacgcacgctgactacttctttggtgatatcccgtgtacgcgtggattaagcgaagaagaggtgcagggtgagtatgaactgaacactggcaaagtgattatcgaaacgctgggcaacgccgagccgctgcatacgccgggaattgtggtgtatcagcacggaccgttcgcctgggggaaagatgcccacgacgcggtgcataacgcggtagtgatggaagaagtggcgaaaatggcgtggattgcgcgcagtattaatccacaactcaatcacatcgacagcttcctgatgaataaacacttcatgcgtaagcacggccccaacgcttattacgggcagaagtagaacacgcgctgcggaaatttccttcctcgggagataactggtctaattccgcagccgtttttcaaaaanagccccctgcgaagggggcaaagcaaactatggcaatgtttcgttggttatacctggtgctagcgataaatatccgcgctggcgtgcatattgccgttactccccggttcccgcatcagaattacgtggtagtacgttgcgccttgcgcatctgtttcttcatttaatgcctgacgtgcttcgctttcagtggcgaaattatgattgatataaatcacgcctaagctttgcacatcgtccatatttctggcctggtggttattaatttcaatggctgcccatgtatttgcacttagcaaaagcacagccagaagggctaaaactcgactgaacatagatacctcctcgacggctgactttgtgtgctctcctctgtgatgatcttctgatttaattttaatcaatgataaagaagttgatggtgaccatttctgatgcagttgttcgaaaaaacaccatgatgaagtgtgatgaacttcaaatcagcgtgttagtccactttggtgaaagatgagatttatttgtcggctggccttgagtttagcggggtatgtcagtactataacgcgtcatttttcagccgacctttaacacgttccttgcctccccgggattcggctgacccagacaggaggctgaataatccgtaaggagcaattcgatgcgtcattacgaaatcgtttttatggtccatcctgaccagagcgaacaggttccgggcatgatcgagcgctacactgctgccatcactggtgcagaaggcaagatccaccgtctggaagactggggccgccgtcagctggcttacccgatcaacaaactgcacaaagctcactacgttctgatgaacgttgaagctccgcaggaagtgatcgatgagctggaaactaccttccgcttcaacgatgccgttatccgcagcatggttatgcgtaccaggcacgctgttaccgaagcatctccgatggttaaagcgaaagacgagcgccgtgagcgtcgcgatgatttcgcaaacgaaaccgctgatgatgctgaagctggggattctgaagagtaatttctgatgaccaaccgtctggtgttgtccggcaccgtgtgcaggactccccttcgaaaggtcagtccatcaggaattcctcactgccagttcgtgcttgagcatcgttctgtgcaggaggaagccggctttcaccggcaggcatggtgtcaaatgcccgttattgttagcggacacgaaaaccaggccattactcacagtataacggtcggcagtcgcataaccgttcaggggttcatttcatgccacaaggcaaagaacggactgagcaaaatggttttgcatgccgagcagattgaattgatagattctggagactagccatatggcacgttatttccgtcgtcgcaagttctgccgtttcaccgcggaaggcgttcaagagatcgactataaagatatcgctacgctgaaaaactacatcaccgaaagcggtaagattgtcccaagccgtatcaccggtacccgtgcaaaataccagcgtcagctggctcgcgctatcaaacgcgctcgctacctgtccctgctgccgtacactgatcgccatcagtaatcggtcacggtccattaatacgactttgagaggataaggtaatgcaagttattctgcttgataaagtagcaaacctgggtagcctgggtgatcaggtaaacgttaaagcgggctatgctcgtaacttcctggtaccacagggtaaagctgttccagctaccaagaaaaacattgaattcttcgaagcacgtcgcgctgaactggaagctaaactggctgaagttctggcagctgctaatgctcgcgctgagaaaatcaatgcactggaaactgttaccatcgcgtctaaagctggcgacgaaggtaaactgttcggttccatcggtactcgcgacatcgctgacgctgtaactgcagctggcgttgaagtggctaagagcgaagttcgtctgccgaacggcgttctgcgtaccactggcgaacacgaagtgagcttccaggttcacagcgaagtattcgcgaaagtgatcgtaaacgtagtagctgaataattcgttattcaacgagacgtaaaaacgccgaccactggtcggcgttttgctttctatttttcgtcaggtattagtttcgcaagtagatccattcaccattctcttgtgtccataagtcaggatggtttgctggcgttagatacatacgagcgcaactgatgtctcgctcctgcggcactcgctcgaaacccaaacccgagtagattgcggctgaacttgataaggaacgcagaccaattttcaaatcatggggtaaatcagaatacgcgtttagcaatgcagcaatgatgaatccgagggcattagaaacgcctgtaacagtgcgaagttggtcgatataaagatcgattgttggtagttcagatgaccagcaattaggcatttgggcaggaagggttacaacgtatcctatcgtttggccggtatagtctggagtaccataaccaggtcccaaaaccacttcgtgtattgtgtatttactgttgggttcgaaggattcgacatcttgcaataaatatttcagttctgcggttaacctcgcacccgcgtaagctttattgtatttctgggcgtgaatattatctaatgtagcttcatggttccatccaaaagaattatcaccattcattgttactccatcgtaagcattacacttcgttgctaacttattgaatgcttgccagtctgagagatctagtttgtggatctcaacagtacgtctgccatcgcaattatgatctcttccacgatttgaaagtaatgtagcgcgtgcgtattgatgaaattttaattttactggtttgtcggtggacgaaaaacgagataaatatgcaggaaatgaataaatagtggttggtaatgtcattgtaatgtgacctgtttaatgtttttataaatatcnnnnnnnaatgttcacagaaaaaaatcgatattaataaaaataagtttgttttctgaagtggtgaaaatagcggatggtgaaagatattaatatcaaaaatcgctcattatggatataacgatgcacccggggagaaaatgacttccacgccttacaccgtacattcttgttgtgcggtatgtaattattctacgctgtcggtatcggtgtattcgttaatcagcaggttaaccagccacaaaaagccattgagaaaattattgattttacatgggattattatattgctaacccctggtttttaaaaattgtgcatagtgaaaatcaaagtaaaggtgtgcattatgcaaaatcacagcgtctcttagaaatcaaccatgcgcacttgcagttaatggaatccttattggatgaagggaagaaatacaatatttttaagccagatatcgacccattgcaggtgaatattaatattgctgcgcttgggggatattatttgatcaaccagcatacgcttggcctggtttatccggtgcgccgtaaaaccccgtccttcagggcggggatatacggcgcggttttccacctaaccaggtgtttgctgttgttcaatgtattgacggatggcggatattggcgcacctccgcagctactggcaaaatagccaggactccacaaaacgcctttgtagtaatacctgactgcaatatctggtcgatctcgtcgcagtaacctacccgatacgcctttgaggctgtttaccagactggatatcgccagtttgggaggatagttaattaacaaatggacgtgatctggttcgccatccatttcaaccagttcagcttcaaaatcagcacatacctttgaaaagtaagtgcgtagtttttctgtcgcgtcatggtcaaaaatctggcgtcggtatctggtgacaaagaccaggtgaacatgcatcaggaaaacacaatgccttccacgccggatatcggtttcttttttcacagaccaaagtatcatttggcctgtgaaacgactacaggcatttaaattccagttaagacccggtggtcaacaggagcgtgaaatgaggcgcttcgcaggcgcatgtcgtttcgttttcaatcgtgctctggcgcttcagaatgagaatcatgaggccggtaataaatacatcccttacgggaaaatggcttcctggctggttgagtggaaaaatgccactgaaacgcaatggcttaaagatgccccgtcacagccattgcaacagtcactgaaagaccttgagcgggcttacaaaaacttcttccggaagcgggctgcttttccccgattcaaaaagcggggacagaatgatgcattccgctacccgcagggcgttaagctcgatcaggaaaacagccgtatttttctgccgaaacttggctggatgcgctaccggaatagccgtcaggtcacgggtgttgtgaaaaatgtcactgtcagccagtcctgcggtaagtggtacatcagtattcagactgaaaatgaagtatcaactccggttcacccttcagcattaatggtcggactggatgctggcgtggctaaactcgccacgctgtcagatggcacagtctttggacctgtaaacagttttcagaaaaaccagaagacgctggcgagacttcagcgacagttaagccgcaaggtcaaattcagcaacaactggcagaagcagaaacgcaaaatacagcgactgcattcctgtatcgcaaatatccgcagggactaccttcacaaagtcacaacgaccgtcagcaaaaaccacgcaatgatagtcattgaggatttgaaggtcagcaacatgtcaaagtcagcagcgggtacggtcagccagccggggcgcaatgtccgggcaaaatcaggtttaaaccgttcgatactggatcagggctggtatgaaatgcgccgccagcttgagtacaagcagctctggcgtggcggtcaggtgcttgctgttccgccagcgtacacaagccagcgttgcgcgtgctgtggtcatacagcgaaagaaaatcgcctgtcacaaagtaaattcagatgccaggcatgtggatatacagcgaacgctgatgtaaatggcgctcgtaacattttagcggcggggcacgccgttcttgcctgtggagagatggtgcagtcaggccgcccgttgaagcaggaacccaccgaaatgattcaggcgacagcctgaacgtagcagggatccacgtccttcagggcttggaggatgtcaacacatcagtatggtttcaccccaggcactggaagccagacgtaaggtcatcaaagagacaatccttagctggcttttggttgacccttcatctaccgcgcacgaataaaactgccatccggctggcgggtgaacaggacctgttgattattccccgtatcaatggttaagcccgtcaccacgccgctggcgttctggcggattttcaccatctgcccgttttgcaaattactcagcggcttacccgcgccttctacctgcgccattgcatagacatcggtagcgggcagtccgtggtcgcggaacagctgcgccatcgttttaccgggttcgacacggtaagagcgccattgattatcaattccgctatctggctggaatggttgcgtttgggtagtttgcggctgttcttctggctggccttcctgtataggttctggagcgaccggagccacctgatcaggataattttgtggggtgactaattgcgcccgcagctgttcttctgtcggcggttgtgattgcgactgaatatctaactgcgcttcacgcgtcaccaccggcgcgttgggcgtatcatcagatggaagcagaaatccgaccaccaatacaatggcggcaataatgatcccccgacgatgcatcggcggcagcgggtccatgaagcgaaaattgtccggcgcgtgccagactttctccagggttggttttagttcaaagcgcccgggcatggtttcctcctgctccgcgtcttgttcctcaatcatagcctatgaataagctaacgctatgatgtccgtggtaaacccgcctttattatattcatacgggatattgctattgtttctttttccctgggatttgtcatcattcccgcgacaaagttttacccaaagaagtgtggctgatatgctgcccgctactttataccctaagaaaggaaatacgatgaccaccccaacttttgacaccatcgaagcgcaagcaagctacggcattggtttgcaggtagggcaacaactgagtgaatctggcctggaagggctgctgccagaagcactggttgcaggtattgccgatgcgctggaaggcaaacatccggctgttccggttgatgtggtgcatcgcgcgctgcgtgaaatccacgagcgcgccgatgccgttcgtcgtcagcgtttccaggcgatggctgctgaaggtgtgaaatacctggaagaaaacgccaaaaaagaaggtgtgaatagcaccgaatctggcctgcaattccgcgtgatcaaccagggtgaaggcgcaattccggcacgtaccgaccgcgttcgtgttcattacaccggtaaactgatcgacggcaccgtgtttgacagctccgttgctcgtggtgaacccgctgaatttccggttaatggcgtgatccctggctggattgaagcactgactctgatgccggtaggttctaaatgggaactgactatcccgcaggaactggcatatggcgagcgcggcgcaggcgcatccatccntccgttcagcaccctggtgtttgaagtcgaactgctggaaatcctctaagcagcgcattctgttcccctcgaaccagaggggagcaggcattcagcaataaacccttcagtttgccaaacggcgctattttgtgttgcaaagaccccgtaagcgtgtatttttgtgagctgtttcgcgttatcaccgtgatatgacactcactttaaacataaaattaacattagatctaaatcttagtattcatcccgcgtattgttacctaatatcgatgagtcccgatacagattcgtcgtatcatagactgactaaaggccgtagagcctgaacaacacagacaggtacaggaagaaaaaaacatggtagatcaggtaaaagtcgttgccgatgatcaggctccggctgaacagtcgctacggcgcaatctcacaaaccgacatattcagcttattgccattggtggtgccattggtacggggttgtttatggggtctggcaaaacgattagccttgccgggccgtcgatcattttcgtttatatgatcattggttttatgctctttttcgtgatgcgggcaatgggggaattgctgctttcgaatctggaatacaaatcttttagtgacttcgcttccgatttactcgggccgtgggcaggatatttcaccggctggacttactggttctgctgggttgtaaccggtatggcagacgtggtggcgatcacggcttatgctcagttctggttccccgatctctccgactgggtcgcctcgctggcggtgatagtgctgctgctgacgcttaacctcgccactgtgaaaatgttcggtgagatggagttctggtttgcgatgatcaaaatcgtcgccattgtgtcgctgattgtcgtcggcctggtcatggtggcgatgcactttcagtcaccgactggtgtggaagcgtcattcgcgcatttgtggaatgacggcggctggttcccgaaaggtttaagtggcttctttgccggattccagatagcggttttcgctttcgtggggattgagctggtaggtacaacagctgcggaaaccaaagatccagagaaatcactgccacgcgcgattaactccattccgatccgtatcattatgttctacgtcttcgcgctgattgtgattatgtccgtgacgccgtggagttcggtagtcccggagaaaagcccgtttgttgaactgtttgtgttggtaggtttgcctgcggctgccagcgtgatcaactttgtggtgctgacctctgcggcgtcttccgctaacagtggcgtcttctctaccagccgtatgctgtttggtctggcgcaggaaggtgtggcaccgaaagcgttcgctaaactttctaagcgcgcagtacccgcgaaagggttgactttctcgtgtatctgtctgctcggcggcgtggtgatgttgtatgtgaatcctagcgtgattggcgcgttcacgatgattacaaccgtttccgcgattctgtttatgttcgtctggacgattatcctttgctcgtaccttgtgtatcgcaaacagcgtcctcatctacatgagaagtcgatctacaagatgccgctcggcaagctgatgtgctgggtatgtatggcgttctttgtgttcgtggtcgtgttgctgacactggaagatgacactcgccaggcgctgctggttaccccgctgtggtttatcgcgctggggctgggctggttgtttattggtaagaagcgggctgctgaactgcggaaataaccgcattatcatgctggatggcgcaatgccatccagcttttagatcactcacccgccagcgcccttgggaacagtacattgttttccaggctgatgtgatccatcaggtcatcaatcagttcattaatgccgttatacatcgctttccaggtggtgcaggcttccggcggcggtgtgacgttattggtattgtgtttgatcacttccagcagttcacccgcttcatcgtgctcgctttccattacgctgattggccccattgcctggctgcccatgccttgtttgatcatcgggaagaggatctgctcttctttcatcatgtggctggaaagctcttcatgcagcatggtcaggtattttgtcagcccttttggcacgctcggtttgtcggcgtgaacgcgctcgactttagtcgcttgcagaatcagctccggcagttgctcgcggtgacgagcgtggtagcgcacgatgatatggtcgatgatttctgccagcggggcgctacgccagtctttctcaatcggttgttcagcaagctttgccagctcagcttcaatgacctcaacatccagttctttacgtgccgccgcacgcgccagcgtttgcttaccgccgcagcagtaatccatatcatatttacgaaacagagccgaagcgcgaggaatagagagcgccagttcacctaaaggttggtcgcgataagccatagctgatacctcattcttaataagataagatgtattttaaatgcatctttaaggcaaaagctataacccttacgtagcagaggcttatttaactcactgccagcgtgtcaactttctgagacagattcagttaaaggtttttctggttttgctctaaccgcgatgaccacgccaatcactaacagcgcgataccgctcagcgtcattagcggcggcatttgctggcggagtaaaaaggtgtacagcaaacctgccagcgtttcgaaaacaatcagcggcccgagaatcactgtcggtaatcgctggctggcgacgttccagcagagtgcgccaacccatgagcaaagcacggctatcgcaatcatcagactaataaacaccagcggacgggggccaaagggtagggagaagtccggcgtttgcgtattcagccagtaacaagcgacgagatagccgataagtgaaaccggcagtgtgaccagcgcctgcgctgttgcccacatcatcggatgtttgtcgggattttcccgcagccagcgggcgttgcgcagggcataccacgcccagcagaccacggaaactaacgccagcacgatgccagaggtataacgtgcccagtcaaaattggggagtccgtggtttaactcagcaatattcacacacgccaggccgatgccaatacaaatcagtgccggggcgagttttccccacgcgagtttgccgtcgcgctggctataaagcagattggcgaagacgggaatcaccaccggcagggtgccgataatcatcgtggaaacaggcgcaccagtacgttgaatggcactggcaaggcagaagtaatagatgaggttgcccatcatagtgagcatcaaggcggtaagccagtcgcgacgcgccaactgacgcagacgcacgcgtcccagccaggcaatgggcagcgcaattaaccctaacgccagataacgccccatcgactgcaacatcgccgggtattccggcacgatcaacggcccgacaaaaataagcccccacatcaaccctgctaacagggcgtacagcacgccgctaatcattactggcatccattgatctgtcagaagaaagttcaggaagcagacatgattgctcccggcatcccgtcattatcagagaggatgcgggaggatgccactttaattaactagttattaacattaaaaagatggcttacgctttcggctaacgttgtcgttgggtggccaatcaatttgctaagtgttttgctgtcatcaaacagaccgcctttcgatgcgccaacgtcagaatccgccagcatatccgccagtccgtcgggcagtccgacgcttttcagtgccgcggcgaaatcggcttcnctcagattttgataggtaacctgtttgccgctctgtttggtcagctctgccgctaactgtgtcaacgtccaggcactatcgcccgccagttcgtaaaccttgccttcgtgaccggcttcgctaatcacgcgtgccgcagctgccgcataatctgcccgcgttgctgaggcgattttgccatcgcccgccgcaccgataaatacgccgtgttccagtgctgccggggcgctggcgaggtagttttcggtgtaccagccgttgcgcagtagggtgtaaacgatgccagaatcagccagcattttctccgtctcgatgtgctcatcggcgaggccgagcggagatttatccgcgtgaagcaggctggtataagcgataaatttcacgccagccgtctttgcggcattaataacattacgatgctgcggggcacgttgacccacttcgctggaagagatcagcagtagtttttccactccctgaagtgcagatgtcagtgcggcttcatcgccgtagtcagcctgacgcacggtaatgccttgtgctgtcagtgcctgggcttttgccggattacgaacgatagccactatttggctggcaggaaccgttttcatcaaggattcaataacatactgaccaagttggccagtggcaccagtaatagcgatcatgggaagtctccatcgttttgtcttgtgtttaaatacgctaacacctaaacttacttttagtaagtacgcacaaaaaggtaagtatgaaatgagtcaggttagcctgtcgcaacaactgaaagagggtaatctctttgcggaacagtgcccgtcgcgcgaggtgttgaaacacgtcaccagccgttggggggtgttgattctggtggcgctacgcgaaggtantcatcgctttagcgacctgcggcgcaaaatcggcggggtgagcgaaaagatgcttgcgcagtcgttacaggcgttagaacaggatggttttcttaaccgtatcgcgtatccggtggtgccgccgcatgttgaatacagcctcacgccgctgggcgagcaggtgagcgaaaaggttgctgcactggcggactggattgagttgaatttgcccgaggtgttggcggtgcgggatgaacgtgcggcataactgccggatgcgcggcctacggtgtatgacttgtagggcggataagatgcgccagcatcgcatccgccaataaatgccggatgcgattgatgatttataggccgaaaaagaagtgttttacttactcaaatccacctgataaatcgcaaacccgatatcatcggtcgcgactttattcatcggatactgccctttctctttaataaacgctgcggctttatctgacggggaagtttcgaaacggatatccagtttcttatcggcagctatcggtgctaaacgccagttgttatctgccgccgggtgaatttcccccgcacgtttcgactcatcagcaatccacgctgccagcaccgagcggttctcatccggtgaagcaaaagcgatatggctgtcgcccgtcccggcaaatttgccgccgtaagcgcgatagttattggtggcaacgaggaacatagcgttcggatcaatcggcttgccattaaaggtcaggttcttaatcctttccgcattggcattaatcatctggcactcgccgtcataacgggcgggctgggtaacatcaatctgataattcacaccatcaataacatcaaagttataagtgcggaaaccatcccagttgatgagtgactgtggtttcgtgctgttgggatcaatctggttaaactgtccggcggagcactccagccactctttcacctctttaccgctggctttcaccacaatcagcgtattgggatagagataaagatcggcggcattacggaaggtcaactggcctttttccacctccacatagcttgccgggtcatttttgcgaccaccgactttaaacggtgcggcagctgaaagcaccggcagttttgccagatccggatcgccctgaatgtaatgctcgacatacgctttttgcgcgttgttcactacttgcacggtcggatcgtcctgcaccagcgccagatagctatacatattgtcggcagatttaccgattggcttgctgacgaactggcgtgtggcatcgtgatcggctttgagtgtttctaccagcttgctgtcttccgccgcgagggattttttattggcgatgtcgtaaatcggccgtgcttccgctttcgcctgcgtcacctgccatttaccgctgtcattactgagttgtaagtcgaccaccccaagatgatcgccccacatgcccggcattaccgccggaacaccattcagcgtgcctttggtgatatcagccccttcgatatcagcaaaatctttacccgggaaaacggcgtgagcatggccaaacataatggcgttaacgcccggaatttcactgaggtaataaactgagttttccgccattactttatacggatcggcagacagcccggaatgcgccagaacgacaacgacatcggcacctttctcgcgcatttcaggctcgtatttgcgcacggtttcggtaatatcattcaccgtcacttttccggataaattagctttatcccagcccatgatttgcggcggcacgacgccaatatagccaatcttcagcgtctgtttttttccgtctttatcgaccacttcggtgtctttaattaaatacggtgtaaacattggctgtttggttctggcgtcaatgacgttggcatttacataagggaatttcgctcctgccagcgcatttttcaggtaatccagaccgtagttaaactcgtggttgccaagcgttccgacggtatagtccagcgtatttaatgccttatagaccgggtgaatatcacctgcttttaatcctttcgccgacatgtaatcggccagcggactcccctgaatcaaatcgccgttatcgaccagtacgctgtttttcacttcattgcgggcattgttaatcaggcttgccgtacgtaccagtccgaatttttccgtggcggtgtctttgtaataatcgaaatccatcatgttgctatgcagatcagtggtttccatgatacgcagatcgaccgtcgctgcattcacactggcggcaatcagcgtggccaggagcgttgcgctaaacttaatcatcagggacatccttttatcatcgggaatacgaaagaaaagggagaataaacgtcttacttatagaacagtgaagaatgccacaattttacgctttgaaaatgatgacactatcacagttggtgcattcattaatgatagggtataagtaaaacaataagttaacaccgctcacagagacgaggtggagaaatgttagatcaagtatgccagcttgcacggaatgcaggcgatgccattatgcaggtctacgacggggcgaaaccgatggacatcgtcagcaaagcggacaattctccggtaacggcagcggatattgccgctcacaccgttatcatggacggtttacgtacgctgacaccggatattccggtcctttctgaagaagatcctcccggttgggaagtccgtcagcactggcagcgttactggctggtagacccgctggatggtacgaaagagtttattaaacgtaatggcgaattcaccgttaacattgcgctcattgaccatggcaaaccgattttaggtgtggtgtatgcgccggtaatgaacgtaatgtacagcgcggcagaaggcaaggcctggaaagaagagtgcggcgtgcgcaagcagattcaggtccgcgatgcgcgcccgccgctggtggtgatcagccgctctcatgcggatgcggagctgaaagagtatctgcaacagcttggcgaacatcagaccacgtccatcggctcttcgctgaagttctgcctggtggcggaaggacaggcgcagctgtacccgcgtttcggaccaacgaatatttgggacaccgccgctggacatgctgtggctgcagctgccggagcgcatgttcacgactggcagggtaaaccgctggattacactccgcgcgagtcgttcctgaatccggggttcagagtgtctatttactaaattcagatggcagaaacagtgtatttcctgattctgccatcctgatttctcccaacctaaaaagttataaataaaaagagattgtatttaaagtgcaaaaattcaattgctaataagttacattttaataatgagcgttttttgatagtttacttctatagtgagatatttaatggcgacataaagtaaccaaataaaataaggttgtcatatgttacccaggatcagacacaataattttattggtgcggtggagttatttgtaaagtcttcgtatacaaaaacacattcaaacaatttttttaacaacatccatcatgcatttaagaaaaaagattggatttcgaattatgatagcctgttaactttgagggagttctttcgttgcgcaactcagattgataaaagtagttatcaggtgctttcatcaaaaaatgaaactgttaacgctatggataagtttcttatcagtttcagccttaaagataacggtgccgaatatacaatgacattgcgaggcagtggatttgaatacgaagaaatccccataacaataaatgagtataactcattcatggatttcaagaaccgtgaatttccgttagaacaaaacagacgattgtatgcctgggatattctgcagaaaaaacagtctgacataccgaaaaggattaaaggttatattcaccaggcgattggtgacgtgtctttaggttatgctttattggatgatatagtaagcaaattaaaacggggtaaatttgaactacaagggccaggaggtggaattaaacagtgcgatggatggtatatttacgaaaaaataattgatgataattttgccatagtcatagaatctttgggctttgcgcttaaaatctatggaggggatgaacgttttcgtaatggttcctctgttgtcttggaggatgaagattactctcttatttataattttctggttaatgcgggttgccaacaagtcgaattagccgaacaagtggatgcgatagtaagtgcgaatctggccgcagatagtgatattaccaaagaaaagatttgcgagaaatataaatcgaccattgaggcgtttaaaaaagagcaactagcgttaccagtattagttcggngtaagaactcagagacttaattcccctatcccatagataacgataggggaaaattatttttgcagaatttatgttattgccattatttgagcaacttttgcagcaggtccatcacttgctgcacctcttcctgagtgagcgccccgtctttggcccattgcacgcgaccgtctttatccagcaccactacagcggaactttcttcatccagctgccaggcaccgcgcgcgacgccattgctatcgacaataaactgcgaccagggataaagctttttattactctccagactgctgcgcacaaacatgccggaacccggaatcgcgtcgtcggtgttaacaatggtggtggtctggtaacgatcgtgcggtaacttcgctgatttaatcgcttcaatcagcgtcgcgtttttntcttttgcagaggtgcgaccagcaatatgttgcagtactcgcacttttcccactaactgcgcgctgttccaggttttgtagctaaactgatctttatcaagcaccaactcgccccgatcggtaatgccaatcggcggcactcgctgaccggtttcgaactgatgtgcggaagccatcatcggcaacagcaggcaggtgagtgccagaatcttgcgtagggtcatggtgtttccttcttatgatatgcaggtgatccgaccacttgggtctgagttttaatcatatgtgctatttatcgaatttcccgcaagtgtgatgccagtttgcggtcaagcgcacaaatcatatgaaaaatgaatgcttatactgaagaccgcgcttcggtaaaaagataattctgaataattgtaacctttaggtaaaaaaagttatacgcggtggaaacattgcccggatagtctatagtcactaagcattaaaatttgcgcctcataatagttgggccgattgtggcaccgcacaggcgtaatactcagcaggagataacaatgaaaattttccaacggtacaacccacttcaggtggcgaagtacgtaaagatcctgttccgtggacgattatacatcaaggacgttggcgcttttgaattcgataagggtaagattcttatcccaaaagtgaaggataagctgcatttgtcagtgatgtccgaagttaaccgtcaggttatgcgtctgcaaacagagatggcttaaccaaagtgctatgcagtaaanngtgctanncagtaaaaagtgctatgcagtaataagacggctcctgattcaggagccgttgatgtttatgggggttacgcgacgctttcttctttatctttagcgtcaggcagttttggcgaaagggctgtggccttgctgtcgatccgggtcaccagcagctggtcgatgcggtagttatcgatatccaccacttcanatntgtagccggcgaatttcaccgaatcggtgcgtttcgggatcttacgcagcataaacatcataaagccgccgatggtttcgtagttgcccgactgcgggaactcgtcaatatccagcacgcgcatgacgtcgtcaatcggagtgccgccgtcaatcagccatgagttctcatcacgggcgacaatctgctcttccagtccctgaccgaccagatcgcccatcagcgtggtcatcacgtcgttgagggtgatgatccccactaccagcgcgtactcgttcatgatcaccgcgaagtcttctcctgcggttttaaaactttccaacgcctctgaaagggttaacgtatccggcacaatcagcgtgttgcgaatttgtacgccgctgttcagtgccaggctttggttagccagcacgcggttcagcaggtctttagaatcgacatagccgatgatgtggtcaatatcttcattacagacgaggaacttagagtgcggatgttccgccaccttatttttcagactttgctcatcttcgtggagatcaaaccaaatcacgttttcacgcggtgtcattgaagacggaacggtacgggattccagctcaaagacgttttcaatcagctcgtgttcctgtttacgtaacacgcccgccagcgcaccggcttccactaccgcgtagatgtcatcagaagtgatgtcatctttacgtaccattggcagtttgaaaatacggaagattatgttcgccaggccgttgaagaaccacaccagcggggtgcaaacgtacaggcagaagcgcatcgggttgatgatacgcaaagccacagcttctggcgcaatcataccgatgcgtttcggggttaaatccgcaaacaggataaacatgccagtcactaacgagaaagagagaataaagctcagttgctcagagagctctgccgacatatagcgggagaacaggctgtgaaaagctggagaaaatgccgcatcaccgacgataccgccgagaatcgccactgcgttcagaccgatttggaccacggtaaagaacatgccgggattttcctgcatattcagaacgcgttgggcatttatattgccttcatcagccagcagtttaagtttgattttgcgtgaggcggcaagtgagatctcagacatcgagaagaacgcacttacagcgatcaagcagagtatgactaaaatactgtttaacatatcttatccgacctttcaggccagatcctcggaaggggaagttgattaatttgtgtgaaatacacattgaaagccgattcgaagaaagtgaaccggcattttcagtggctagtatagcgtaaggtactgtaaagccgccagagggttaaaattcagacagctgaaaaatgcaaaactgcctgatgcgctatgccgatcaggcctacgcagtccttgcaatatattgaatttggacgattttgtaggcctggcaaggcgtttacgccgcatccggcataaacaaaacgcactttatcaacaatctacatttgtacccgtaacgctatgcttccggtggcagacagacgccaattccgccaattccacagtaaccgtacgggtttttatgcagatattgctggtggtcatcttcggcataataaaacggtgtggcgttagcgatttccgtggtgatgtgacgatcgtcatcggcggcaagcatcgccgcctgaaaacgttccagactggcgcgagctgcggcatcctgttctgggatcagcggataaatcgctgaacgatactgcgtgccgtggtcattgccctgacgcattccctgggcgggatcgtgattctcccaaaatacctgtagcaactgctcatagctgatgacggaaggatcgtaaacaatgcgtaccgcttcggcatgaccagtatcaccggagcacacttcccgataagtcggatttggcgtatagccgccggtataacctgcggcggtgctgtaaacgccgtgtaactgccagaacagacgctccacaccccagaaacaacccatcgcaaaaatggcaatctccattccgtcaggtacattggtcattgagtgaccgttaaccgcatgcagcgtggctacgggcatcggggtgttacgtccaggcagggcatcggcgggggaaaccagatgctttttatcaaataaactcatggtgtcgctctcccgaaaatcggtcattggggttaaggttgtaacaagaggcgtatttgcacacaataaccaccgtgaataggtctaaagtaaaacataagaaatatttggggtttagtctgctttttaatccatattactggatttttgttaagccgtttaacggcgttccaggggcaggaaaaaaggatattcaggagaaaatgtgcgctatatccgacagttatgctgtgtaagcttactctgcttaagcggatctgccgtcgccgcgaacgtccgtctacaggtcgaggggtnatcgggacagctggaaaagaacgttcgtgcgcagctttctacgattgaaagtgatgaagtgacgccagaccgtcgctttcgcgcacgcgtcgatgatgctatccgcgaaggtctgaaagcgctgggttattaccagccgaccattgaatttgatctccgtccaccgccaaagaaagggcggcaggtattgatcgccaaagtcacgccaggcgtgccggtgttaattggcggcaccgatgtggtattgcgcgggggcgcgcggaccgataaagactatttgaaattgctcgatactcgcccggctattggcacggtactgaaccagggcgattatgaaaatttcaaaaagtccttaaccagcattgcgttgcgtaaaggttatttcgatagcgaatttaccaaagcgcagctgggcattgcgctcggcctgcataaagccttctgggatattgattataacagtggcgaacgttaccgctttgggcatgtgacctttgaaggatcacaaatccgcgatgaatacctgcaaaatctggtgccgtttaaagagggcgatgagtacgaatcgaaagatctggcagaactgaaccgccgactttctgctaccggctggtttaactcggtggtggtggctccacaatttgataaagcgcgcgaaacgaaagtattaccattgacgggcgtggtttcgccgcgaacagaaaacactatcgaaaccggggtcggttactctacggacgtgggaccgcgcgtgaaagcgacgtggaaaaaaccgtggatgaactcatacggtcacagtctgaccaccagtaccagtatttccgcgccggaacagaccctcgacttcagctataaaatgccgctgctgaagaatccactggaacaatattatttggtgcagggcggttttaagcgcactgacctgaacgataccgagtctgactccactacgctggtggcttctcgctactgggatctctccagcggctggcagcgtgccattaacctgcgctggagtctcgaccactttactcagggtgaaattaccaacaccacgatgctgttttatcctggggtgatgattagccgcacgcgttctcgtggtggcctgatgccaacctggggcgactcgcaacgctactctatcgactactccaacacggcctggggttcagatgtcgatttctccgttttccaggcgcagaacgtctggatccgcacactgtacgatcgccatcgttttgtgacacgcggcacgctgggctggattgaaaccggtgatttcgacaaagtaccgccggatctgcgtttcttcgccgggggcgatcgcagtattcgcggctacaaatacaaatctatcgccccgaaatacgctaacggtgacctgaaaggggcctcgaagttgataaccggatcgctggaataccagtacaacgtgaccggaaaatggtggggcgcggtgtttgtcgatagtggcgaagcggtaagcgatattcgccgcagcgactttaaaaccggtaccggggtcggcgtacgctgggaatcgccggtcgggccaatcaaactcgattttgccgtaccggtcgcggataaagacgaacacgggttacagttttacatcggtctggggccagaattatgagtttatggaaaaaaatcagcctcggcgtggttatcgttatcttactgttgctgggatcggtggcgtttctggtgggcaccaccagcggcctgcatctggtatttaaagcggcggatcgctgggtgccaggactggatattggcaaggtcaccggcggctggcgcgatctcaccttgtctgacgttcgttatgagcagccaggcgtggcggtaaaagcgggtaatctgcatctggcggtcggtcttgagtgcctgtggaacagcagtgtttgtattaatgacctggcgctgaaagacattcaggtcaacatcgacagtaaaaaaatgcctccttctgaacaggttgaagaagaggaagatagcggtccgctggatctctccacgccgtatcccatcaccctgacacgggtggcactggacaacgtcaacatcaagattgatgacaccacggtatcggtgatggacttcacctccggcctgaactggcaggagaaaaccctgaccctgaaaccgacgtcgctgaaaggcctgctgattgctctgccgaaagtggcggaagtggcgcaggaagaagtggtcgaaccgaaaattgaaaatccgcagccggaggaaaagcntntcggcgaaacactcaaagatctcttttctcgcccggtattgccggaaatgaccgacgtgcatctgccactcaacctgaacattgaagagtttaagggagagcaactgcgcgtgacgggcgatacggacattaccgtgcgcaccatgctgctgaaagtgagcagcattgacggcaatactaaactggacgccctggatatcgattccaatcaagggatcntcaacgccagcggcacggcgcagctgtcagacaactggccggtggatatcaccctcaacagcacactgaacgtggagccgttgaaaggtgaaaaggtgaagctgaaagtgggcggcgcgctgcgcgaacagctggagattggcgttaatctttccggtccggtggatatggatttacgcgcccagacgcgactggcggaagccggattgccgctcaacgtggaagtgaacagcaaacagatttactggccgttcactggtgagaagcagtatcaggcggatgatctgaaactgaaacttaccggcaaaatgaccgattacacgctctctatgcgtacggcagtgaagggactggagatcccgccagccaccattacccttgatgccaaaggtaatgaacagcaggtcaatctcgacaaactcaccgtcgcggcgctggaagggaaaactgaactcaaggcgttgcttgactggcagcaggccattagttggcgcggtgagctaacgcttaacggcattaacaccgccaaagagatcccagagtggccgtcgaaactcaatggcttgattaaaacccgcggtagcctgtacggcggcacctggcagatggaggtgccagaactgaaggttaccggtaacgtcaaacagaacaaagtgaacgttgacggcacgctgaaaggcaacagttatatgcagtggatgatcccagggcttcatctggaactggggccaaacagtgccgaagtgaaaggcgagctgggggtaaaagatctcaatcttgatgccaccatcaacgcgccggggctggataacgcgctgccggggcttggcggtacagcgaaagggctggtgaaagttcgcggcacggtggaagcgccacaactactggcggacatcaccgnnngcggcctgcgctggcaggagctaaccgtggcgcaggttcgcgtggaaggcgatatcaaatccaccgatcagattgcgggtaaactcgacgtgcgcgttgagcaaatttcacagccggatgtaaatatcaacctcgtcaccctgaatgccaaaggcagcgaaaaacagcacgagttacagttgcggattcagggcgagccggtttccgggcagcttaatctggcaggaagttttgatcgcaaagaagaacgctggaagggaactcttagcaatacccgcttccagacgctggtcggcccgtggtcgctgacccgcgatattgcgctggattaccgcaataaggagcaaaaaatcagcatcgggccacactgctggcttaacccgaatgcggaactgtgcgtgccgcaaactatcgatgcgggggccgaagggcgtgcggtggtgaatctcaaccgcttcgaccttgccatgctgaaaccgtttatgccagaaaccactcaggccagcggtatcttcacgggtaaagcggacgttgcctgggacaccaccgaagaggggctgccgcagggcagtatcaccctttcggggcgtaacgtgcaggtaacgcaaaccgtcaacgatgcggcgctgcccgtggcgtttcagacactgaatctgacggcggaattgcgtaacaaccgtgccgaattgggctggaccatccgcctgaccaataacggccagtttgatggacaggtgcaggtgaccgatccgcaaggccgccgtaatcttggtggcaacgtcaatatccgtaacttcaaccttgcgatgataaaccccatctttacccgtggggaaaaagcagcggggatggtgagtgccaacttgcgtctgggtggtgatgtgcaaagcccgcagttgtttggtcagcttcaggttacgggtgtggatatcgatggcaactttatgccgtttgatatgcaaccgagccagcttgcggtcaactttaacggtatgcgctcgacgcttgccggtacagtacgaacccagcagggtgaaatctacctgaacggtgatgccgactggagccaaattgaaaactggcgggcgcgggtaacggcgaaaggcagtaaagtgcggatcaccgtgccgccgatggtacgaatggatgtatcgccagatgttgtattcgaggctacaccaaacctgtttaccctcgatggtcgcgtggatgtcccttgggcgcgcatcgtggtgcacgatctgccggaaagcgcagtaggcgtctccagcgatgtggtgatgcttaacgataacctgcaaccggaagagccgaaaacggcgtcgattccgattaacagtaacctgattgtccacgttggcaacaatgtgcgcattgacgcctttggcctgaaagcgcggctgacgggcgatcttaacgtcgttcaggacaaacaagggctgggcctgaacgggcagatcaacatccctgaagggcgcttccatgcctatggtcaggatctgattgtgcgtaaaggtgagttactgttctctggcccgccggatcaaccgtatcttaatattgaagctattcgtaacccggatgctacagaagacgacgtaatcgccggagttcgcgtcactggtctggcggacgaaccgaaagcggagatcttctctgacccggcgatgtcgcaacaagctgccttgtcttatttgctacgtggacaagggctggagagcgatcagagcgacagtgcggcaatgacctcgatgctgattggtctgggggttgcgcaaagtggccagattgtgggtaaaatcggcgagacgtttggcgtaagcaatttagcgctcgacacccagggagtaggcgactcctcccaggtagtggtcagcggctatgtattgccaggtctgcaagtgaaatacggcgtgggtatatttgactctatagcaacactcacgttacgttatcgcctgatgcctaagctatatctggaagccgtgtctggtgtagaccaggcactggatttgctctatcagttcgagttttagcaatgcgaatatttgtctacggcagtttacgccacaaacaaggcaacagtcactggatgaccaatgcccagttactgggcgatttcagtatcgataactaccagttgtatagcctgggccactatccaggcgcagttccggggaacggaacggtacacggtgaagtttatcgtattgacaacgccacgctggccgaacttgatgccttgcgcaccaggggcggtgaatacgcgcgccagttgattcagacgccgtacgggagtgcatggatgtacgtttatcaacgacccgtcgatggattaaagctaattgaaagcggcgactggttagacagggataagtaaccctatgcatacgccaccttcgggtggcgttgttttttgcgagacgactcgcattctgttttgtaattccctcaccttttgcttttctctccgagccgctttccatatctattaacgcataaaaaactctgctggcattcacaaatgcgcaggggtaaaacgtttcctgtagcaccgtgagttatactttgtataacttaaggaggtgcagatgcgtattaccataaaaagatgggggaacagtgcaggtatggtcattcccaatatcgtaatgaaagaacttaacttacagccggggcagagcgtggaagtgcaggtgagcaacaaccaactgattctgacacccatctccaggcgctactcgcttgatgaactgctggcacagtgtgacatgaacgccgcggaacttagcgagcaggatgtctggggtaaatccacccctgcgggtgacgaaatatggtaaagaaaagtgaatttgaacggggagacattgtgctggttggctttgatccagcaagcggccatgaacagcaaggtgctggtcgacctgcgcttgtgctctccgttcaagcctttaatcaactgggaatgacgctggtggcccccattacgcagggtggaaattttgcccgttatgccggatttagcgttcctttacattgcgaagaaggcgatgtgcacggcgtggtgctggttaatcaggtgcggatgatggatctacgcgcccggctggcaaagcgtattggtctggctgcggatgaggtggtggaagaggcgttattacgcttgcaggcggtggtggaataaggtgtgtttatttatcgcgggcataaaaaaacccttactaaccgaagcccggcgttcagggttattacgccagaagaacttatttattctttgcgcgctcgaaggaggcaacgatttcagctttagcggcttctgcgttttcccaaccttcaactttcacccacttgcctttttcgaggtctttgtagtgctcgaagaagtgagcgatttgcgctttcagcagttcaggcagatcgttaacgtctttaatgtgatcgtattctttgctcagcttgctgtgcggaaccgcaaccagtttcgcatcttcaccggcttcgtcggtcattttcagaacgccaaccggacggcaacggatcacagaacccggctgcagcgggtacggagttgggaccagtacgtcaactgggtcaccgtccagagacagggtgtggttgatgtaaccgtagttgcacggatagaacatcgcggtggacatgaagcggtcaacgaacagtgcgccgctctctttgtcgatttcgtatttgatcggatctgcgttagccgggatctcaataacaacgtagatgtcttccggcagatctttacccgcagggacgttgagtaagctcatgtctgtttcctttaaaaatatgtggcaaacaagtgccgagtattatagccaactcgcgccgaatgtcttcgcttgttttcgtcttcattttcctttttcgccagttttaagacggtatgcagagcaggaaaatccataaccgtagccgcatttttcatagtgagatgaaagcgattacaaacttgtgattaacgttttatttacttttttgaagtgtgatgtaacgcaatccgttacataacgaattgtctatagttttttcgcgaacatcttttcaccaataataattactccgacgaggacaaccctatgtggaaacgcttacttgtagtctctgcagtctcggcagccatgtcgtctatggcgttggccgctccattaaccgtaggattttcgcaggtcggatcggaatccggctggcgcgccgcagaaaccaatgtggcgaaaagtgaggccgaaaaacgcggaattacgctgaaaattgccgatggtcagcaaaagcaggaaaaccagattaaagcggtacgttccttcgttgcacaaggggtggatgcgatctttatcgctccggtggtcgcgacaggttgggaaccggtattaaaagaggcgaaagatgccgaaatcccggtcttcttgctcgaccgttccatcgatgtgaaagacaaatctctctatatgaccaccgttactgccgacaacatcctcgaaggtaagttgatcggtgactggctggtaaaagaagtgaatggcaaaccatgcaacgtggtggagctgcagggcaccgttggggccagcgtcgccattgaccgtaagaaaggctttgccgaagccattaagaatgcgccaaatatcaaaatcatccgctcgcagtcaggtgacttcacccgcagtaaaggcaaagaagtcatggagagctttatcaaagcggaaaacaacggcaaaaacatctgcatggtttacgcccataacgacgacatggtgattggtgcaattcaggcaattaaagaagcgggcctgaaaccgggcaaagatatcctcacgggttccattgacggtgtaccggacatctacaaagcgatgatggatggcgaagcgaacgccagtgttgaactgacgccgaacatggcgggacccgctttcgatgcgctggagaaatacaaaaaagacggcaccatgcctgaaaagctgacgttaaccaaatccaccctttacctgcctgataccgcaaaagaagagttagagaagaagaaaaatatggggtattgagggttgctatgcctgatgccgattcgtaggccggataaggcgctcgcgccgcatccggcgatggtgcactgaagcctgatgcgacgcttaccgcgtcttatcatgcctactgggagcacgctttacaccgggggaaaccatgacgaccgaccaacaccaggagatcctccgcaccgaaggattaagtaaatttttccccggcgtcaaagcgttagacaacgttgatttcagcctgcgccgtggcgaaatcatggcgctgctcggtgaaaacggggcgggaaaatcaacgctaatcaaagcattaactggtgtataccacgctgatcgcggcaccatctggctggaaggccaggctatctcaccgaaaaataccgcccacgcgcaacaactcggcattggcaccgtctatcaggaagtcaacctgctacccaatatgtcggtcgctgataatctatttataggccgcgaacccaaacgcttcggccttctacgccgcaaagagatggaaaagcgcgccaccgaactgatggcatcttacggtttctccctcgacgtgcgcgaaccgctcaaccgcttttcagtcgcgatgcagcaaatcgtcgctatttgccgggctatcgatctctctgccaaagtgctgatcctcgatgaacccaccgccagtctcgacacccaggaagtggagttactgtttgacctgatgcgtcagttgcgcgatcgcggcgtcagcctgatctttgtcactcactttctcgatcaggtctatcaggtcagcgatcggatcaccgtcttacgcaacggcagtttcgtaggctgtcgggaaacgtgcgagctaccgcagatcgaactggtaaaaatgatgctggggcgcgagctggatacccacgcgctacagcgtgccgggcgaacattgttgagcgacaaacccgttgccgcgttcaaaaattacggcaaaaaaggaacgatcgcaccgtttgatctcgaagtacgccccggcgagatcgtcggtctggctggattgctgggatcaggacgtaccgaaaccgccgaagtgatcttcggtatcaaacctgctgacagcggcacggcgttgatcaaaggcaaaccgcaaaacctgcgatcgccacatcaggcttcggtacttggcattggcttctgcccggaagacaggaaaaccgatggcatcatcgctgccgcctcggtgcgggaaaatatcatcctcgctctccaggcccagcgcggctggctacgtcccatttcccgcaaagaacagcaagagattgccgaacgctttatccgccagcttggcattcgcacaccttcaactgaacaaccgattgaatttctctccggcggcaatcagcaaaaagtgttgctttcacgttggctactgacccgaccgcaatttctgatcctcgatgagccaacccgcggcattgatgttggtgcccacgccgagatcatccgcctgattgaaacgctatgcgccgatggtctggcgctgctggtgatctcctccgaactggaagaactggtgggctatgccgaccgggtgatcatcatgcgcgatcgcaaacaggtggcggagatcccgctggcagagctttccgttccggcgatcatgaatgccattgcggcgtaaggagaacagtgtgatgcctcaatctctcccggacactacgccgccaaaaaggcgctttcgctggccaacgggaatgccgcagctggcggcactgttgctggtgctgctggtcgatagcctggtggccccgcatttctggcaggtggtgcttcaggatgggcgtttgttcggtagccctatcgacattcttaatcgcgccgcccccgttgcgctactggcgattggtatgacgctggtgatcgcaacaggtgggattgatctctccgtaggggcggtgatggctatcgccggagccacaacggctgcgatgacggtcgcgggattcagcctgccgattgttttgttaagcgccctgggcaccggcatcctggcgggattgtggaacggcatactggtagcgatcctcaaaattcagccgtttgtcgccactctgatcctgatggtcgccgggcgcggcgtggcgcaactgatcacctccggacagatcatcacgtttaactcgccggatctctcatggttcggcagtggatcgctgttgttcctgccaacgccggtcattatcgcggtgctgacgcttatcctgttctggctgttgacccgcaaaacggcgctggggatgtttatcgaagccgttggtatcaacattcgggcggcaaaaaatgccggggtaaacacgcggatcatcgtcatgcttacctacgtgttgagcgggctgtgtgcggcgattgcgggcattatcgtggnggcggatattcgcggtgccgatgccaacaacgccggattatggctggagctggacgccattctcgcggtggtgattggcggtggttcgctgatgggcggacgttttaacctactgctttcggtggtgggggcgctgattattcaggggatgaacaccggaattttgctttcgggctttccgccagagatgaaccaggtggtgaaagcggtggtggtgctttgcgtgctgattgtccagtcgcaacgctttatcagtctgattaaaggagtgcgtagccgtgataaaacgtaatttgccactgatgatcaccatcggcgtctttgtgctgggttatctctactgcctgacccagtttcccggttttgcttccacaagagtgatctgcaatatcctgaccgataatgcctttcttgggataatcgccgttggcatgacctttgtgatcctctccggtgggatcgatctctccgttggttcggtgatcgcctttaccggcgtgtttctggcaaaagtgattggcgatttcggcctctcgccgttgctggcatttccgctggtgctggtaatgggctgtgcctttggcgcatttatggggcttttgatcgacgccctgaagatcccggcatttatcattactttggcaggaatgttctttttgcgcggcgtcagctacctcgtttcggaagagtcgatcccgataaaccatcctgtttatgacacgctctcaagccttgcatggaaaattcctggcggcggtcgcttaagtgcgatggggctgctgatgctggcggtggtggttatcggcatattcctcgcgcatcgtacccgctttggtaatcaggtgtacgccattggcggcaatgcgacgtcggcaaacctgatggggatttccactcgcagcacaactattcgcatttatatgctctctaccggactggcgacactggcggggattgtcttctcgatttatacccaggccggatacgcgctggcgggcgtaggtgtggaactggacgctatcgcctcagtggtgattggcggtacgcttttgagcggtggcgttggaacggtattagggacgctttttggcgtggcgattcagggactgattcagacttacataaactttgatggtacgctgagctcatggtggacgaaaatcgccatcggtattttgttgtttatttttatagcattacagcgtggattaacggtgctgtgggagaatcgtcagagttcgcctgtgacaagagtcaacattgcgcagcaataaaatcgcctctccgtgtggagaggcgcaggagattacgcgtccgggaactcacagataaagcgttcgacatcttcaaccatatggtcgttgccgacaaagaatgaacggcgctggtgcagggtttccgggataatatccagaatacgctctttgccatcgctcgctttaccgcccgcttgttccgccaggaatgccatcgggttgcactcatacagcaaacgcagtttgccgtccgggtggctggcggtgcttgggtagagataaataccgcctttcagtaggttacggtggaaatccgcaaccagtgagccgatataacgtgaggtatacgggcggttggtggatttatcttcttcctggcagaatttaatgtacttcttcaccccgttcggaaacttaatgtagtttccttcgttgatggagtaggttttgcctttctccgggaagcgcatccgttcctggcacaggcagaaaacgccgagcgaaggatcgtaagtaaaagcgtgaacaccgcatccggtagtgtaaaccagcatggtagaggagccgtataccacgtaacctgccgcaacctgtttgttaccaggctggaggaaatcttcttccgttaccggcgtgccgacgggcgtaactcggcggtagatggagaaaatggtaccgacagagacgttaacatcgatgttggacgagccatccagtgggtccatcagcaccacgtattttgcatgttcacagccttcaaagacaacaatctcatcttcttcttcagaggcaatgcctgcaacgatatcgcgtgctttcagtgcggctttcagtttttcattagcgaacaagtcgagtttttgctgaacctcgccctgcacgttctcagcaccgctggcacccaggatatcaaccagtcctgctttgttgatatcgcgatggataatcttggcgcccagttttattgccgacagcaaagcagtgagctcaccggtagcatgagaaaactcgtgctgcttttcgacaataaattcacctaacgttttcataaaactttccctgcaatgtttatggagtaaagcgaccgcaacaatcttaacaaataatctcaatgttgcgctcaggtgaatcgcgccagcaaattacggattatcctgaaatgcgtttctcacttgcccgacatatgcgtaaaatgagcggcagattaaaaaaggatagtgacgcatgcgcattcatattttaggaatttgtggcacgtttatgggcggtctggcgatgctggcgcgccagttaggccatgaagtaacgggttcggacgccaatgtgtatccgccgatgagcaccttacttgagaagcaaggcattgagctgattcagggttacgatgccagccagctcgacccgcagccggatctggtgattattggcaacgccatgacccgtggaaatccgtgtgtggaagcggtactggaaaaaaacatcccttatatgtcaggtccacagtggctgcacgattttgtgctgcgcgaccgctgggtgctggccgttgccggtacacacggcaaaaccaccaccgcgggaatggcgacctggattctggaacagtgtggttacaaaccgggctttgtaatcggcggtgtgccggggaactttgaggtttcggcgcgtctgggcgaaagcgacttctttgttatcgaagcggatgagtacgactgcgccttcttcgacaaacgctctaaatttgtccattactgcccgcgtacgctgatcctcaacaaccttgagttcgatcacgccgatatctttgacgacctgaaagcgatccagaaacagttccaccatctggtgcgtatcgttccggggcagggtcgtattatctggccggaaaatgacatcaacctgaaacagaccatggcgatgggctgctggagcgagcaggagctggtgggtgagcagggtcactggcaggcgaaaaagctgaccaccgatgcttccgaatgggaagttttgctggatggcgaaaaagtgggcgaagtgaaatggtcgctggtaggcgaacataatatgcacaatggcctgatggcgattgcagcggctcgccatgttggtgtagcgccggcagatgccgctaacgcgctgggttcgtttattaacgctcgccgccgtctggagttgcgtggtgaagcgaatggcgtcacggtatatgacgattttgcccatcatccgacggcgattctggcaacgctggcggcgctgcgtggcaaagttggtggtacggcgcgcattattgctgtgctggagccgcgctcgaataccatgaaaatggggatctgcaaagacgatctggcaccttcattaggtcgtgccgatgaagtcttcctgctgcaaccggcgcatattccgtggcaggtggcagaagtggcagaagcctgcgttcagcctgcacactggagtggcgatgtggatacgctggcagatatggtggtgaaaaccgctcagcctggcgaccatattctggtgatgagcaacggcggttttggtgggatccatcagaaactactggatggtctggcgaagaaggcggaagctgcgcagtaattcggcctcagcctgagatagtgtgcgtaggccggataaggcgttcacgccgcatccggcatttgagcatagtgcctgatgcgacgcttgatgcgtcttatcaggcctacaggtgcaccgcatccggcaaaccatactcacatcaacaacgaaaattacccttcattctccgccagttcgcgcagatactggaaaatctggcgtgcggatttcggcggcttattcccttctttctctttcttcgcgttgcggatcagagtacgcagttgctgacgatcggcatcgggccacagatttaatacctcagcgatggcgtcatcaccttgatcgatcagacgatcgcgcaggttttccagtttatggaacagcaccacctgctggttgtgacggtttttcagcttatccagcgcctgacggatcggttctacatcgcgctggcgcagcatcttaccgatgagctgcaactggcggcggcgaccttccatcttaatacgctgggcgagctcaatagccgcgcgcagatccgcatctaacgggatcttatccagcgcgtttttccccagatcaacaatttccgcgccaaggcgttttagctcctcggcatcacgtttaatttcacttttactgacccagataatttcatcgtcttcgtcttcgatgtcatcaccgggaacgtcgtcgagccagtcttcgggctgcttagtcatctcaggctccttaaaaaaagaggctaatgttaccagttaagatgcgcactgaaaaacggttctctgttagacttcagagaaactctctacattatggcacttgcaatgaaagtaatctctcaagttgaagcgcagcgcaagattctggaagaagcagtttccactgcgctggagttggcctcaggcaaatcggacggtgcggaagttgccgtcagcaagaccaccggcattagcgtaagcacgcgttatggtgaagtggagaatgttgaattcaatagcgatggcgcgctggggatcactgtttatcaccagaaccgcaaaggtagcgcatcatccaccgatttaagcccgcaggccattgcccgtactgtacaggcggcgctggatattgcccgttatacctcgccagatccctgtgccggcgtggcagacaaagagctgctggcctttgacgcaccggatctcgacttgttccaccctgcggaagtttccccggatgaagccattgaactggcggcccgcgcagaacaggcggcattgcaggcggacaaacgcatcaccaataccgaaggtggcagctttaacagccactacggtgtcaaagtttttggcaacagccacggcatgttgcagggttactgctcaacgcgtcattcgctctccagctgtgtaattgccgaagaaaatggcgatatggagcgtgattacgcctacaccattggccgcgcgatgagcgatttgcagacgccagagtgggtcggggccgattgcgctcgccgtactttatcgcgtctgtcaccgcgtaaactctccaccatgaaagcgccggtcatttttgccaatgaagtggcaaccgggctttttgggcatctggtgggggcgatagcgggtggatcggtttaccgtaaatctaccttcctgctggattcgctgggtaaacaaattctgccggactggctgaccattgaagagcatccgcatctgctgaaagggctggcatcgacgccatttgacagcgaaggtgtgcgcaccgagcgtcgcgatattattaaagatggcatcctgactcagtggctgctgaccagctactcggcgcggaaactggggctgaaaagcaccggacatgcgggcggtattcacaactggcggattgccggacaaggtctaagcttcgagcagatgctcaaagagatgggcaccgggctggtggtgacggaattgatgggccagggcgtgagtgcaattaccggtgattattcccgtggtgcggcgggcttctgggtagaaaacggcgaaattcagtatccggttagcgaaatcaccatcgcaggtaatttaaaagatatgtggcgcaatattgtcaccgtcggtaacgatattgaaacacgcagtaatatacagtgtggttctgtgctgttgccggagatgaaaatcgccggacagtaaaaaaactggcgcgacctgccgcgctataaactaaaaaattacacaaaatcattcgcactgcatcgagacggaaagtgaatgagggccggggagcgtactcgcagtacgtgacccggtcgaatgagcgtagtcgtcgatgangcagtgtgaaggatgaagtgtaaataaaaaaggaagtgagcaatgcgaaaaagcctgttagctattcttgcagtctcctcgttggtattcagttcggcgtcgtttgctgctgatcttgaagacaatatggaaaccctcaacgacaatttaaaagtggtcgaaaaagccgataacgcggcgcaagtcaaagacgcgttaacgaagatgcgcgccgcagcgctggatgcgcaaaaagcaacgccgccgaagctcgaagataaatcaccggacagcccggaaatgaaagatttccgccacggtttcgacattctggtcggtcagattgacgacgcgctgaagctggcaaatgaaggtaaagtaaaagaagcgcaggctgctgcagagcaactgaaaacgacccgcaattcatatcacaagaagtatcgttaattcctcatttccctgttgcctgcactcaggtaacagggaacttatcatcgcaaatgatgcaccacctgattgctgctgccgcgccagatcagggaagggtcttttaaatcctgcacaaatttgccgtcgaccagcacgttaatcaaatcaacaacctgcatttgcgcagcgttgagttcgtcgagtttatagcctgtccacacccagatgtctttacccggacactcggcgcggatgcgttgtaccagtttcagaatatccggcacgttttgcggatgcagcggatcgccgccggagagggaaataccctggcgtttgatacgagtgtcattcagatcgttaatgatctggtcttccattgctttagtaaatggctgaccggaatttacccgccatgtgcttttgttatagcaaccggggcattcatgaacacacccggagacaaacagggtgcagcgagtgccgggaccgttgacgatgtcgacaggatagtactgatgataattcattatttcgcctggcttatcagtccgcgtgtaggctgtatcaggcaatcaacgcctgatgcgacgctgtggcgtcttatcaggcctacagccgttgccaaatgtaggccggataaggcgtttacgccgcatccggcaatcaacgcgggatgcgacgctttcacatcacatccggcatttgcttagtgcagatcaacctatctgcccatttcccaaatgtttaacgcggcgcttaacttcttcctgcttgccggcgttaaacggacgtgcatccgggctacctaaatatccgcacacgcggcgagttaccgacacacgggaggcgtcatggttaccacatttcgggcaggtgaagcctttgctggtgcactcgaactcaccggtaaagccacactcgtagcactcatcaatcggtgtattggtgccgtaatacggtacatgctgatagctgtaatcccagacatcttccagcgccttcaggttgtgctgaatgtttggatactcgccgtagcaaatgaaaccaccgttcgccagcggcgggtaaggcgcttcaaagtcgatcttgtcgtacgggttcaccttcttctccacatcgaggtggaaactgttggtgtagtaacctttatcggtcacgcccggcaccacgccaaactcagcagtatcgagacggcagaagcggtcgcacaggttttcactcggcgtgctgtagagactgaaaccataacccgtttcttctttccactgatccactgcctgacgcagacgttcaacaatggcgatacctttcgcgcggagctgctcgttgtcgtaaacatgttcgccgccgaacagcgcgttaatggtttcgtggatgccgatgtaacccagcgaaatagacgcacgaccgtttttgaagatttcagaaatatcatcgtcagcattgagacgcacgccacaagcaccttccatatagaggatcggggccacgcgcgctttcacgccttcgagacgagcgatacgggtcatcagagccttacgtgccagcaccagacgttcatccagcagcttccagaaggtggcttcatcgccttttgcttccagagcaatacgcggcaggttcaggctgatcacgccgaggttgttacgaccatcgtggatctgctcgccgttttcattttcccacacgccgaggaagctgcggcagcccatcggggttttaaacgaaccggtgactttcactacctgatcgtagttcaggatatccggatacatgcgcttgcttgcgcactccagcgccagctgtttgatgtcgtagttcggatcgccttttttatggttcagaccatcgcgaatcgcaaacaccagtttcgggaacaccgcagttttacggtttttaccgaggcctgcgatacggttacgcaggatagattcctgaatcaggcgcgactcccagctggtgcccagaccaaaaccaaaggttacaaacggcgtctgaccgttggcggtgtgcagggtgtttacttcgtactccagcgactggaaggcatcgtagcactctttaatggtacgagagttagcgtagccttcggcgtccgggatgttccactcttctgcggtcttgcgatgtttgttgtagctggcggtgacaaacggtgccagcacttcatcgatacggttaatggtggtgccgccataaatatggctggcaacctgagcaataatctgcgcagttaccgcggttgccgtagagatcgacttcggcggttcaatctcggcgttccccatcttaaagccctgggtcagcatgcctttcaggtcgatcaacatgcagttgaacatcgggaaaaacggtgagtaatcgagatcgtgatagtgaatatcgccacgctcatgtgcctgcaccacgtcacgcggcagcaggtgctgacgtgcatagtgtttagccacgatcccggccagcaggtcgcgctgggttggaatcaccttgctgtctttgttggcgttttcgttgagtaacgaggcgttggtctgctcgaccagaccacggatctcctgattcaggcgaccgcgtttttcacgttcaatgtcgcgatcgtgacggtactcgatgtaagcacgagccagttgtttgtatggacctgacatcagctggttttcaacagcggtctggatctcattgatatccacctggttgcggccctgcatctgctcgctgacaactgcagcaacagtggcgcaataatcggcatcatcgacttccgctgctttagctgcacgcagaatcgcttctttgatgcgctctgatttaaacggcactttgcagccgtctcgtttcatcacatgcggtgtcatgatcgctccatatttttaagaacaggttatccacagaaattgggaaaggcgttttccggttttttcgtttcgttttccggtgctttccgcaatcgccatccgcttatccacaacgccgcacctttttcgtggggagctgtagtagcaattatagtcgattaatacaacatattgggttgggacgcattttaaagtctatatatagtgctttgcatcaaggatgtttgaactttttttgatgtagctcaaagtaaaaagcagagcgtacggatgacgggcgctacagcgttatgtaaattttttaatgaatttgctggttgaaaaatcaacaaaaacaacatgctgacagacaaaaccccggaatgaccggcattaccggggnttagggaagatttanttctgtaaccaccagacagcntcaaaaggccgtaaagtcatggcacagggttgtggtgaggcttcttcgtagttatgcatcacaagctgccagttgccgcgcatttgccctggctgccagggttggatctcacggctaaggttggcaatgaccagcaaggtttgccccttccattcacggcgatagcaccacaatacagggctgtttggcagcagatcctggtaattgccccatgtcaggatggcttcctgcttacgcagtgcgattaacttttggtaggtgtaaaacaccgaggactcatcggccagcgcggcttctacgttgatttgttgatagttatcgcctaggccaatccacggttcgccagccgtaaacccggcattatcgccgttgctccattgcatgggcgtgcggctgttgtcacgggatttactggcgaggattgccaataantcgtcggcatcacgcccatcgttgcgcagctcggcaaacatattgaggctctctacgtcgcgatagtcagtaatgcgcgtgaaatgcgggttggtcatgccaatctcttcgccctggtagatatacggcgttccctgcatgccatgcagcaccatcgccagcatttttgccgcaggcacgcggtattcaccttcatcaccaaagcgagaaacaatgcgcggctgatcgtggttgcaccagaacaaggcattccatgctacgttgtgcattccttgttgccagtggcggaacaatgttttcaacgccacaaagtcaggtttagccagcgtccatttttcaccaccgggataatcgaccttcaggtgatgaaaattaaaggtcatcgacaattcactgcctgtcagtgccgcgtatcgctggcaatgctcaaggctggtggaggacatttcacctacggtcattaacccgcgtggcgtaaacacatcgcggttcatctcgtgcaaaaactcgtgtgctcgtggcccgtcggtgtagaagcgacgcccgtcgccatccaggtcatcagggaaacgcgggtctttggagatcagattcaccacatccaggcgcaacccgtcgaccccacgatcggcccagaactcacagacttttttcagctctgcgcgtaccgctggattctcccagttgagatccgcctgttctggtgcaaagagatgcaaatagtactgttcgctttccgcatgccagcgccacgcactaccgccaaattttgaacgccagttgttcggtggcgtttctggttcgccatcgcgccagatataaaactggcggtaagggctttctttgttcagcgcctcgcgaaaccaggcatgttgggtagaggtatggttaaacaccatatcgagaatgatacgaatcccgcgcgattttgcctgcgtcaccagttcgtcaaaatcgtccagcgtgccgtaggtgggatcaatcgccgtatagttcgctacatcgtaaccgttatcgacctgcggagagacataaaagggggttagccagatggcatcaacgcccagtttatgcagatagtccaggcgttggataacgccacgtaaatcgccggtgccgctacccgtggtgtcctgaaaactctttggataaatctggtagataacgccgttttgccaccagtggggaagattagtcattacgttattcctgcaaatgcgaggggnnnnnnntgcgccccgaagaaaattaaacaatgtccagcgtgcccaggcggtatttccgctgatagataaacgaggtgagtacaatcgggatgatgatggcgatagccattgccagcgcaaacacctgccagtagctcggttgaatcgagagaattcccggcaggccgcctacgcngatgccattcgccataacgccgttcaggccgcatagcaatcctgccagaccagaaccaatcatcgcgcacagcatcgggaagcgatatttcaggttgatgccgtacattgcaggctcagtgaccccaagccaggcggagatcgccgcaggcacggagatctcgcgttcattgtgcttgcggctggaaatgataatgcctatcacggcggagccctgagcgatattcgacagcgcaatcagcggccacactggcgtaccacccatgctttgaatcatctgcaaatcaatagcaagcgtggtctggtgtacaccggtgatcaccagcggggcgtacaggaagccaaacaatgccgcgccaatcggagcaaagctgccggtcatcaggtgacgtaccgcaaaggcaacgccatcgccaatcatgcgaccaaacggagcaatcagcgcatgggcgaggaacaccgcgaggatcagcgaacagacgggcaccaccaccagatagaggtaatccggcacgatgcgtttaaggcgagtttcaataacgcccagcgccagcccggctaacagtgccgggatcacctgcgcctgatagcccactttggcgatgctgaacatgccaaagtcccacacttccggcagctgctgcccgagcagataagcgttcatcagttggggggaaaccagtgtcacgccaagcacgataccaaggatcggcgtgccgcccatttttttcaccgctgaccagcaaatcccgaccggcaggtagaagaagatcgcttcaccgatcaaccacagaaaatcgtagatcgtttgcagggaagggtacatttgcgccagcgtttgaccgttgctcatgggcaaatcgccgatcacattgcgaaaaccgaggatcaaaccgccgctaatcaacgcgggcagcaacgggaagaagatctctgcgaaatgagagatcaactgctcatgccatttcatattctgccgggcggctttttttacctgctctttatcaacctgcgcctgtccggttgacgctatcagtgcttgatagtaatcacccacgttggtgccaatcaccacctgaaattgcccggcattggtgaaacagcctttcaccatggggagttgctcaatttctttcggtctggcattggccggttggttgaggacaaagcgcaggcgagtaatacagtggctcaccgtcgcaatattgccgcgcccgccgaccagttcaatcaaccgatcgatatccgtttggtttattttgctcatcataaagccccatggcagatgacatttttggttggctgcagaatatattgcgcggaaaaatttaaaaacgggaacgttcccgaaacgcagcgaagatcacaatttatcgttcaggaaacgatcaggacaggttggcggggatgatgatttgttgcggttcgctgcgtccggttacctgcgcgatcaactggcaagccgcctggcgtccagcttcggcgtaaccaggatctacggtgacgatctccggatgaaggaatttcattaacggcgtattaccgacgctcgccagttgcaaggtgtcgatgcgttgctcttgcaggtatttacttgcgccaagtgccagcgtgtcggttgcgcacagtaaggcggtagtttcaggcgtaatcacttttgctacgttctcatagccttgcttcatagcaagccctggcagggcggcaacgggatgcagtttatgcgctttgcagaacgccaggtaggcttcgtgacgtcgcttaccggttgtcacgtcactgtgcggcacgccgagataactgatattacgatgcccctggtcatacagccgttgcatcaggatcttgattgccccttcgtcgtcataacagaccgaagcaaagccttttgcgtcacgcgccagcagaaccagcgatgactgccagtgggctaacatttcttctgttatgccagtaaaaccgaacagcactacgccgtcgatattacgccgtttcagcacccccaaatgttcggcaactaattgcggggaaaactgactttccatcatgattgggtcgtaaccttgttcatagaacgctggcagcatggtttgaacggcgagattttctgacaacgaatccagacgggtaacaatgatggcgaccactttatcgctttgcccacgcatagcgcgcgcagaacgggaaggggaaaatccatgctgattcatcactgcttcaacacgctcgcgggtgcgctggctcacgccgctttngttattcagcacccgggaaactgtagatttccccacgccgcttaagcgcgcgatgtctttgatggtcagccgattttgcatcctgttgtcctgtaacgtgttgtttaattatttgagcctaacttacccgtgcattcagcaatgggtaaagtctggtttatcgttggtttagttgccagcaggtattatatcgccatagatgctacgaatattattggattctccttattatttgcggcgcttttttcacttaccggaggttatatggaacctgatcccacgcctctccctcgacggagattaaaacttttccggtaagcccgtcttttcacggcgttaccggatgcgtaaggccgtgacgttttaacgtccctgctcagctttattaccttcaggtaaggcttcgccacgcctgaagacatttctgtactgtttcagacagtgcggagggactccttatgtttaaagaaatttttacccggctcattcgccatttaccttcccgtctggttcatcgtgatccattgcctggcgcgcagcagacagtgaatacggtggtcccgccgtccttaagtgcgcattgcctgaaaatggcggtgatgcccgaagaagaattgtggaaaacgttcgacacccatccggaagggttaaatcaggcggaagtggaatctgcccgcgaacaacatggtgaaaataaattacccgcacaacaaccgtcgccgtggtgggtacatttatgggtctgctatcgcaacccctttaatattttactcaccattctcggcgctatttcttacgccacggaagatttatttgccgcgggcgttatcgcgctaatggtcgctatttcaacgttgctgaactttattcaggaagcacgttccactaaagcggcagatgccctgaaagcgatggtcagcaataccgcgacggtgctgcgcgtaattaacgacaaaggcgaaaatggctggctggagatcccgatcgaccagctggtgcccggcgatattataaaactggcggcgggagatatgatcccggcagatttacgtatcttgcaggcgcgggatctgttcgtcgctcaggcgtcgttaaccggtgagtctctgcccgtggaaaaagccgctaccactcgccagccggagcacagcaatccgctggagtgcgacacgctgtgttttatgggcaccaccgtggtgagcggcacggcacaagcaatggtgattgctacaggtgccaatacctggtttggtcaactggcggggcgtgttagtgagcaggaaagcgagccgaatgcctttcagcaagggatcagccgcgtcagtatgctgctgattcgctttatgctggtgatggcaccggtggtgctgttaatcaatggctacaccaaaggcgactggtgggaagcggcgctgtttgcgcttnnnnnnnnnnnnngcctaacgccggaaatgttgccgatgattgttacntcgacgctggcgcgcggcgcagtaaagctgtcgaaacagaaagtgatcgtcaaacatctggatgctattcagaactttggcgcaatggatattctgtgcactgataaaaccggcaccctgacacaggataaaattgtgctggagaatcataccgatatctccggtaaaaccagcgaacgcgtgctgcatagcgcgtggttgaatagtcattatcagaccggacttaaaaacctgctcgatacagcggtgctcgaaggtacggatgaagagtcagcgcgctcgctggccagtcgttggcaaaaaatcgatgagattccgtttgatttcgagcgtcgccggatgtcggtggtagtggcagaaaataccgagcaccatcagctggtttgcaaaggtgcattgcaggaaatcctcaatgtgtgttcgcaggtgcgtcacaatggcgagattgtgccgctcgatgacatcatgctgcgtaagattaagcgggttactgatacgctgaatcgtcaggggctgcgcgtggttgcggtggcgacgaaatacctgccagcgcgtgaaggagattaccagcgggcggatgaatccgacctgatcctcgaaggatatattgctttccttgatccgccaaaagagacaaccgntccggcactgaaggcattaaaagcgagtggaattaccgtaaaaatccttactggcgacagtgagttagttgcagcgaaagtgtgccatgaagtggggctggacgcgggagaggtggtcattggtagtgatattgaaacgctatctgacgacgaactggcaaatcttgcacagcgcactacgctgtttgcccgcctgacgccgatgcataaagaacgcattgtgaccttactgaagcgcgaagggcatgtggttggctttatgggcgatggtattaatgatgcgcccgccttacgcgctgcggatatcggcatttctgtggacggcgcggtagatattgcccgtgaagcggctgatatcatcctgctggaaaaaagcctgatggtgctggaagagggggttattgagggacgtcgcactttcgccaacatgctgaaatacatcaaaatgacggcgagttctaacttcggtaatgtgttcagcgtgctggtggcgagtgctttcttgcccttcctgccgatgttgccgttacacttgcttattcagaacctgctgtacgatgtgtcacaggtggcgatcccgtttgataacgtcgacgacgagcaaattcaaaagccgcagcgttggaatccggcggatctggggcgctttatgatcttcttcggaccgatcagctcgatcttcgatattctgacgttttgcctgatgtggtgggtattccatgccaacacgccggaaacgcaaacgctgttccagtcgggatggtttgtggtgggcttactgtcgcaaacgctgattgtgcatatgatccgcacccgccgtgtgccgtttattcagagctgtgcatcgtggccgttaatgatcatgaccgtgatcgtgatgattgtcgggatcgcattgccgttttcaccgctggccagttatctgcaattacaggcgctgccgttaagctatttcccgtggctggttgcgattctggcagggtatatgacattaacccagttggtgaaagggttctatagccgtcgttacggctggcaataaagaataaactgggcacgatagccccgattcagattgcagacaaagtaagctttgttcatgccggatgcggcgtaaatgccttatccggccaacaaattcaataaattgcaggaatcacgtaggcctgataagcgtagcgcatcaggcgattttgcgtttgtcatcagacttaatccgggcatgatagcccggatttccatcaagattagcgacgaacagcgatcgcttcgatctcaatcttcacgtctttcggcagacgggcaacttcaacgcaagaacgtgccgggaaggtggcgttgtgttcggtgaagaaggcttcgtaagtggcgtttacggttgcgaagtcgttcagatcttttacaaacacggtagttttaacgatgtcgcccactttcagaccagcggcttcgacgatcgcttttacgttatccagcgactgacgtgcctgtgcagcgacgtctgccggtacttcgcccgttttcggatttaccgggatctgaccggaagtgatgatcatattgcccanatcaacgccctgtacgtaaggaccgatagctgccggtgcattttccgtcgcgatagttttgctcatgatttctcctttattacagcggtaaaaagtctggctcattatagggagccagacttttattaccaaccgcaattaattggccagcaccacattatgggaaaactctttttcacagtatttgcatttgagcgcgatatcattggcgcgttttcgcacggcaaagctggaagaaaccggttcggcatggctgatacagttgctgttcgggcagaccagcacattgtcgatgcgctccggcagacttgggcgcgatttacccaccacttcatagttgtcgatacggttaaccgtggcttgcggcgcatacaatgccagttgatctacctggtcttcactcaaaaaggtattttcgattttgatcagatctttgcggcccatctcgccagaaggcaggttcagaccgatggtgatgcgctgatccgtttcggtcagcttgaacagactcaacagcttaaaaccgatctgggcggggatatggtcaattaccgtgccgcgtttaatagcttcaacctgcaatttattatcgtgtgtcatctctatttccccttacagtaccagatcgcgattcagaaccagtgccagtaacgcctggcgagcgaaaatcccgttgcctgcctgctggaagtaccaggcgtgtggcgttttatcaacatccgtcgcaatctcatcaacacgcggcagcggatgaagtactttcatattggctttggcgttgtggagatcgctggcgcgaagaacaaactgcgctttcacgttggcgtactcggacgggtccagacgctctttttgcacgcgggtcatgtacaggatgtcaacttccgccatcacttcttcaatagagctgtgcagactccatgcgatccctttttcatcaagcatatccagaatgtattgcggcattgccagcgcgtccggcgcgatgaagtaaaaacggttgccgtcgaacttcgctaacgcctgagtcagggagtgaacggtgcggccatatttcaggtcaccaaccattgcgacgtggagattgtccagacgcccctgggtttcctgaatggtgaataagtccagcaaggtttgcgtcggatgttggttggagccatcaccggcattcagtaccggtacattgccggaaaactcggtggccaggcgcgccgcaccttcctgcggatgacgcatcactatcgcatcgacgtaagtgctgataaccgaaatggtatcggccagcgtttcgccctttttacccagtgatgtattggcgctgtcggagaagcccaccacgctggcacccaggcggtgcatggaagtttcgaaagagaggcgggtacgggtagaggnttcgaagaaacagctggcaatgactttgtgcttcaacagctctggttgcgggtttgctttcagtttcgccgctgtcgccagcaccagattaaggtcatcgcgactaaggtcgtttatggaaatgatatgtttctgatatagcggattagccatcttttatctcctgacgcctgggcaaaaaaaagcccctcgattgaggggctgggaatgggtgatcaacgggaagaaaaacggcaggccagcgtcttttttcagacgcggtaagacaaaatgtcgaacacactgaaccatacatcctcccggcaaattgtccggcattatactcatcgtcagaagcggtgcaagcatttgatgcaatattttgtcagcgcaaacggtttatttgaattataagtcaaaatatatgcatttttatttactgtgattctggaggggaactgtcgttcggtatcaataattgcagacatttcctgcttttttctttttcactttcacgcaatcagatatgcattttattccattcatccgacttatagggcggagtgtgaaaacgaacggctaacactattgcttacagctcagggatgcgcgctatcactttaatttcaaaatcaaagcctgccagccatgtaacgcccaccgccgtccaggttggataaggtggcgcgctaaatatttcatttttcaccgtcatgatgtcttcaaattgtttttctggatcggtatgaaagctcgtaacatcaatgatatcgtcaaaagtgcatcccgcagctgccagggtcgcatgcaaattatcaaatgccagtctgacttgttgctgaaaatcgggttctggtgttccgtcctctcgacttcctacttgcccggaaacaaacagcaaatcgccggaacgaatagccgcagaataacgatgttctgcatacagtgaatgtcggccagcagggaaaacagcggttctttctaccatttggttatcctcaagatttacgacatgaacagaagatttatatttaccaggagccgcttttagcggacgacgtgagtaaacaaaacccagacatcatgggaaatggctgggcttaattgagcgtagtcggttatgcgccaaacgcgccatcaatggtatgcatcgcgccggtaacaaaactggcttctggccctgctaaccatgcgaccataccagcgacctcttccggttgcccatgtcttttgatagccataaaactatgcaacatatcgcgcattggcccgttggcgggattagcgtcggtatcaattggccctggctggacgacgttgatggtgatcccacgcggtccaaaatcacgggccagcccgcgcgccatgccttgtagggcagatttactggcggcataagcagccatgcctgcaacaggcatacgatcgccattcacggagccgatgattaagatgcgcccaccttcgggcatctgccgggcggcttcaacagaggcatggtaaggagcatgaatattgattttgaaaaggcgatcaatatcgtcggcatttaattccagggcatcgccaaagacgccaatacctgcatttaccaccaggatatccaatgcgccgctcttacgaacgacatcaatgacagcgtctctgtcagcactatctgtaaatactgctgtcgctcccgtctcttgtgccaggcgttcagcggcatctttcgaccccgcataggtgaatcgtacattggccccatcggtgacgaaacgacgtacgatagcggcaccgattccacgactgccaccgaggatgagaactgtcttacctgtaaaagcgcccataaggactccttgatttattatgtaacatgcattacaaaactgttttaactttctgtcaacaagttttgtaatggtcactaaaaaacaatctcgcgttccaggtcgtcccagacgtttcgctcctgagcaggcagtctctgcggcaaaagtgctttttcaccaaaaaggtttcgatgctgtcagtgttgctgaagttactgattatcttggtattaaccccccgagcctctacgcggcttttggcagtaaggctgggttatttagccgtgtactcaatgaatatgtcggtacggaagctattccgcttgtcgatattcttcgtgatgatcgtccggtaggggagtgcctggctgaggtattaaaagaagcggcgcgcagatatagccaaaacggcggctgcgctggctgtatggttcttgaaggcattcatagncatgatccacaagcgcgtgatattgccgntcaatattatcacgccgcagaaacggccatttatgactatatcgccaggcggcatccacaaagcgcacaatgtgtgactgattttatgagtaccgtgatgtcagggctttctgcgaaggcacgagaggggcactccctcgaacaactctgtgcaactgctgcactggcgggggaagcgataaaaactattctcaaggagtgatgctggccttgatccgaaaggcgggaacgcgcctgccgataagttgtgataagacaataattcacgcgttaaggctggcggaattgatcatcttttcgtataacggtggaaatgaaacattgttttaattaaggagtggaaaagatgatcatcggaaatattcataatcttcagccgtggctaccccaggagttacgccaggcgattgagcatatcaaagcacacgttacggcagaaacgccaaagggcaagcacgatatcgaaggtaatcgtctgttttatcttatctcggaagatatgaccgagccgtacgaagctcgccgtgcggagtaccatgcccgctatctcgacattcagattgtgttaaaaggtcaggaaggcatgaccttcagcacacaaccggcaggtacgccggataccgactggttagctgataaagacatcgcatttttgccggaaggcgttgatgagaaaacagttatccttaatgaaggtgattttgttgtgttttatccgggggaagtgcataaaccgctgtgcgcagtgggtgcaccagcccaggttcgcaaagcagtagtgaagatgctgatggcgtgatgacttttcgccgtaaataactccaggtttacggcgagtttgtgaaaagagcgttttttgatatttttttgtgagtaaaatttgtaatgcttagacgttcttattaactcaaggagttcgtcatgagcaaaatatcagatttgaattattctcaacacattacattagccgacaattttaaacaaaaaagtgaagttttaaatacctggcgtgttggaatgaataattttgcccgtaatgccgaggggcaggataacacaagaaatatccttaatcctaagacatttttggagtttttggtaaaaatatttaccctgggttatgtggattttagcaaacgctccaacgaagcgggaagaaatatgatggctcatattgagtcctcatcttatatcaaaaataatgatggcagtgagataatgaagtttgttatgaataatcctgaaggggaacgagcggattcacccaaggtgattatagaantttcactttccactattactactatggggactcgtcaaggacatacagccattatatttccacaacctgatggttcgactaaccgttatgaaggaaagtcctttgaaagaaaagatgagagttcattacacctgattactaacaaggttctggcgtgttaccaacgcgaagctaacaaggaaatagctcgtctattaaataatcatcagaagttaaataatctacagaagttanannnnctannnnnnnnnnnnnnnnnnnnnaagnnaaataatctacagaagttaaannatanncagaagttaaataatatacaggagttaaataattcgcaggagttaaataattcccaggagttaaataattcgcaggagttaaataactcgcaggacttaaaaaattcgcaggtgagttgtaaaggttcagttgattttacgattgcggatttattagaaaaatcattgaataatgcattattagcaataaggaacgaacatctgctattaatgcctcatgtatgtagtgaatcgatttcatacttactgggcgaaaatggtatacttgaagaaatagataagctctacgaattaaatgatcacggaattgataatgacaaagaaggtaacaatgaaattaatgacatcatgattaacctgtctcatattcttattgaatccttagatgatgcaaaggttaatcttacaccggtcatccattcgatgttgatgacttttttagaattgccatataataatgatgtaaaaatactggagtggtgttttaataaaagcatgcaatattttgatgattctgcaaagatagagcatgcatgctccgtaataaatcatattaattttcgtcgcgatcagtctaaagtagctgagacattatttttcaatctcgataaagaaccctataaaaatagccctgaattacaggagttgatttggaaaaagttggttgtatatgtcaatgattttaacttaagcaatcgagaaaaaacatatttaatacaaagaatatttaataatgttgagtcactatttaataaagtacctgtcagtattttagttaatgatatttttatgaatgatttttttatgaaaaacactgagatgattaattggtacttccctcggttacttaagagctatgaggatgaaaagatttattttgataagttagggtataattttaataataaagagtctaatgaagagattatgaaaaatcaaccaaaagatgttattgaagaaaaacttaanaatgaattaaaacttaggtttagaatgatgcaaactatcttgaaatcggaggttaatgtatcgccatttattgaccaacagcgtttaaatacactaaatcctccggaaaatttacgtatagcaatagaaaaatttggctggaagaaaaaaactatcactgcataaaataatgtgacgccgggatgtttctgtatttcccggcatctttatagcgatatcaattatttactgagtgtcgcgaccatcaccgctttgatggtgtgcatgcggttttccgcctgatcaaaaacaatgctggcggcagattcgaagacctcatcagtcacttccattccgccatgtaggccaaactcttccgccattttcttgccaagcgtcgtttggtcatcatggaacgcgggcaggcagtggaggaatttgacctccgggttaccggtcaactgcatcatcttgctgttcacctgataatcacgcagtaatgcaatgcgttcagcccatttttcttttgcttcacccatcgacacccatacatcggtatagataaagtcagcaccttcaacgcctttagctacatcttccgtcagcgtaatattcccgccattttgttgtgccagggcgcggcattccgtaaccagcgcagcttccggccagcatgcctgtggcgcgaccagacgcaaatccagaccggtaagcgccgcagcttcgagcatcgaattgcccatgttgttacgtgcgtcacctgcatagaccagcgtcatttcgttgaatggtttaccgggtaaatgctcctgcatggtgaggagatccgccagcaactgcgtggggtgaaactcattggtcaggccgttccataccggcacgccagcgtattccgccagtgtttcgacaatctcctgaccatagccgcgatactgaataccgtcatacatgcgacccagcacgcgggcagtgtctttaatcgactctttatgaccaatctgactgccgcttgggccgagataagtaacgcgagcaccctggtcatatgcggcaacttcgaaagagcatcgggtacgggtcgagtctttttcgaagatgagcgcgatgtttttaccagtgagtttggcttcttctttgccgcttttcttatcggctttcagcttcgcggctaactgcagcaggctgttgagttcagctggcgtgaaatcgagtaatttcaggaaatgcttatgataaaacccggacatagatccctcctgtggctaacgtctcaatgaattaaaattcaatttatatggatgattattcatttgcaagtctaaagcataaatctttgtcacaaaggtggaggcaatgccagtggtgtgtgacaatatgagtatcggcaggacattaagaggaatgagccatggcaaacccggaacaactggaagaacagcgtgaagaaacacgtttgattattgaagaattactggaagatggcagcgatccggacgcgctgtacaccatcgaacaccatctttccgcagacgatctggaaaccctggaaaaagcagcagttgaagcgtttaaactcggttacgaagtgaccgatccagaagagctggaagttgaagatggtgatatcgtgatttgctgcgacatcctcagcgagtgcgcgttgaatgccgatctgatcgatgcccaggttgaacaactgatgacgctggcggagaaatttgacgttgagtacgacggttggggcacttactttgaagatcccaacggcgaagacggcgacgatgaagattttgtcgatgaagacgatgacggggttcgccactaattaattgattaaaatgcccgatagcacacactagcgggcatttttttagagttcgcgtagcatccgcacttcacaatcaacatggcccgtgcagccaagtgcatagtcgatatgttgaaaacctaaatgttcatacaaaccaatcgcttctttcaaaaaagcggtcgtttccagatagcagcgtttgaagcccatttctcttncctcctccatcgcctttaaggccagtttttttgccagccctttgccgcgaatagccggaagaaaatacatcttttgcagttcgcaaatgtccgattcactacctgctaatggcgcaatcccaccgccgccgaccacttcaccntcgtactcaaccacccaatatgcatgacccggctgactatacacttgatacagctcgtcaagattcggatcggcgacggtgtagcctttatcagcggtaagaccgtattcggcggatacctgacgaatgacgcgggcgatagcaggattatcctgcagcgtcaggcgacgcattacaggtgattgcggcgcaatgttattcatagtttaacccaataaaaataaagtaattatacatttgtttaataccactctcttcttacgtgcgcaagcgtcttataaagcaataaagtttttgccagcctattactgataagagtattgtaacgtggcagaacattttactgtctgtatctataaattatatcaatggattttttaattcagggaatttttatggctcaagttattaatgaaatggatgttccgtcccattcgtttgtttttcatggtacaggtgagagatattttcttatttgtgtggtgaatgtgttgttaacgattataacgctaggtatctatttaccatgggcattaatgaaatgtaagcgttatctctatgctaatatggaagttaacggacaacgattttcttatggaattactggtgggaatgttttttttagttgtcttgtttttgtttttttctatttcgcaatcttaatgacagtgtcagcagatatgccgcttattggctgtgttttgactttgtcactgttggttttgcttatatttatggcagcaaaaggactgcgttatcaggccttgatgaccagtctcaacggcgtaagatttagttttaatttctctatgaaagggttctggtgggtaacctttttcttgccgattttaatggccattgggatggggactgttttctttatctcgacaaagatgctacatgccaatagttcaagtagtgttattgtatctgtggttctgatggcaatagttggtattgtttccattggtatttttaatggtactttatatagcctggtaatgagttttctctggagcaataccagtttcggtatacatcgtttcaaggtgaaattagatactgcgtattgtataaaatatgccatcctcgcatttttagctttattaccttttctcgctgttgctggttatattatcttcgatcaaatattaaatgcgtatgatagttctgtgtatgcaaatgatgatattgagaatttacagcaatttatggaaatgcaacgtaaaatgataatcgcgcagttaatctattattttgggattgctgttagcaccagttatttaacggtgtcgttgcgaaatcattttatgagcaacctgtcactgaatgatgggcgtattcgttttcgctcaactttaacataccacggtatgctttatcgcatgtgtgcgttggtggtgatatccgggattacgggcggtctggcttatccactgctgaaaatatggatgattgactggcaggcaaaaaatacgtatttgctgggcgatttggatgaccttcctttaatcaataaagaagaacaaccagataaaggcttcttagccagtatttcacggggaattatgccttctttaccatttctgtaagagataaaaaggccggagcatgctccggccttcgttttcatcactgtgttttgattacagcgcggcgataacagcctgctgttcaatcagcttcgctttcgcttccgcatagccttccagcttctcacgctctttcgcgatgaccgcttccggtgcgcgggcgacaaagccttcattcgccagcttgttctcgatacggctgatttcgccttcgatcttcgccacttctttcgccagacgcgccagctcatcttctttgttgatgaggccagccatcgggatcagcagctctgcgccgtcgatgatcttcgtaacggaaaccggacctttgtcatcggcaggcagcacggtgatgctttccagacgcgccagggtttgcaggaagccacggttttcatttacgcgacgttctgcatccgcgctgcaaccacgcagcagcagctccagcggtttgcccggcgcgatgttcatttctgcacggatgttacgtaccgcaacgatcgcctgtttcagccattcggtgtcggccagtgcggcttcatcaacctgagatgcatcgtactgcgggaacggctgcagcatgatggtgtcggcagtgataccgcaaagtactttcacacgctgccagatggtttcggtgatgaacggaatgatcggatgcgcgaggcgcagcagaccttccagtacagtcaccagcgtatggcgagtaccgcgcagttctgcttcggtgccaccgttcattaccggcttggtcagctcgagataccagtcacagaactggttccaggtaaactcatacagaatgcctgcggcgatatcgaagcggaagctgtccagcgcttcgcggtacgctttgatggtctggttgaactccgccagaatccagcggtccgccagcgacagcgtcatttcgccgccgttgaagccgcaatcctgaccttccgtgttcatcagcacaaagcggctggcgttccacagcttgttacagaagttacggtagccttccagacgcttcatatcccagttgatgtcacgaccggtagacgccagtgccgccagggtgaagcgcagggcatcggtgccgtgcggctcaataccgttcgggaactgcttctcggtgcgcttacggattttgtccgccagctgcggctgcatcatattgccggtacgtttttccagcagttctggcagcgaaataccgtcaaccatatccagcgggtcgataacgttacccttggatttggacatcttctggccttcgtcgtcacgaatcagaccggtcatgtaaacggtgtggaacggcacctgcggtttgccattttcatctttgatgaagtgcatggtcatcatgatcatgcgggcaatccagaagaagatgatgtcgaaaccagataccatcacgctggttgggtggaactggcgcagtgcgtcggtgttttccggccagcctagggtagagaaggtccacagcgcagaagagaaccaggtgtcgagaacgtcttcgtcctgacgcagggcaacgtcggcaccgaggttattttccttgcgcacttcttcttcgttgcggccaacataaacgttacccgcttcgtcgtaccatgccgggatacggtgaccccaccacagctgacgagagatacaccagtcctgaatatcgcgcatccaggagaagtacatgttttcgtactgcttcggtacgaactgaatgtcgccgttctcaaccgcttcaactgccggcttcgccagtacatcggcacgtacgtaccactggtcggtcagcattggttcgataactacgccgccacggtcgccgtaaggaacggtcaggtcgtgcggtttaatttcttccagcaggccgagtgcgtcaaccgcagcaacgaccgctttacgtgcagcaaaacgctcgagtttctggaactctgccgggatttcgctggaataaacgtcagattcgttacctttggtatcgaacacctgggcgctttcacggatatcgccgtcaaaggtcaggatgttgatcatcggcagcgcgtgacgtttacccacttcatagtcgttaaagtcgtgcgccggagtgattttcacgcagccggtgcctttttccatgtcggcgtgttcgtcgccaacgatcggaatacgacggttaaccagcggcagaatgacatatttgccaatcagatctttgtaacgcggatcttccgggttaacggctacgccagtatcgcccagcagggtttccggacgggtagtcgcgaccaccagataatctttaccgtctgcggttttcgcaccgtcagccagcggatagcggatgtgccacatcgaacctttcgattcgcggttttccacttccaggtcagagatagcggtgcgcagtttcgggtcccagtttaccaggcgtttgccacggtaaatcaggtcttctttatatagacgaacgaaaacttctttcaccgcattggacaggccttcgtccatcgtgaagcgttcacgttcccagtcgacggagttgccgagacggcgcatctgacgggtaatcgtgccgccggattccgctttccattcccagattttgtcgatgaaagcttcgcggccgtagtcgtgacgggttttaccttcttctgcggcaatcttgcgctcaacgaccatctgggtagcgatcccggcgtggtcagtaccgacctgccacagggtgtttttgccctgcatgcgctgatagcggatcatggtatccatgatggtttgctggaaggcgtgacccatatgcaaactgccggtgacgttcggcggcgggatcatgatgcagaaactttcctggctttcatcgccattaggcttaaagtagccctgcttttcccagtgctcgtaaagcggctgttcgatatcttgtgggttatatgtcttttccattatttccaggttgccgtattcaggttgaaaccagccacgcggtaggctttatagcgttcgcgcgccagttgtttcagagaatcttcataaggaacgaagtctaccacttctgtgaaagcggtggcaaaatctgcaaagcttgttcgcagactaatcaatatatcgcgcgggctgctgctgcgtttttgcggccaggcgatctccaccggcgcaccgccgcgcggtccttctcccgctaaattatgcggaacaaagctttctgccggacgcgcccacagggcttcatccagccggtaagcctgcttttcatcttcacaggcgatgagcacgcgcttaccgctgcgccaacgttctgcggcaatttcacacaccagttgctcaacggcgcttaagccatcgacggtggtgtcattgtccagaaggtagaacgtcgcgtttttcatatatggggcttcttgtggtggatttaaatacgcatcaggtatacaccgcagcgcctgatgcgacgctgttgtgtcttatcaggcctacgagttcagtgctgtgtgtaggtcggataaggcgctcacgccgcatccgacaataacagcattgcctgatgcgacgctgccgcgtcttatcaggcctacgagttcggtgctgtgtaggtcggataaggcgttcatgccgcatccgacaataacagcattgcctgatgcgacgcttgcgcgtcttatcaggcctacgagttcagtgctgtgtaggtcggataaggcgttcacgccgcatccggcaataacagccttgcctgacgcaattactcttcgccgttaaacccagcgcggttcaacaggaactgtgccagcaacgctaccggacgaccggttgcgccttttgctttaccagaacgccaggcggttcctgcaatatccaggtgcgcccagttgtacttacgggtaaagcgtgacaggaagcaacctgcggtaatcgccccaccaggacgaccgccaatgttcgccatatcggcaaaattggactccagttgttcctgatactcgtcacccagcggtaagcgccatgcgcggtcaccggattgttcagacgcggcaatcagttcatgggccagcggattatggttcgccatcagaccggtaatgtgatgacccagcgcgatcacgcaggcaccggtcagcgtcgccacgtcaatcaccgcttccggctcaaaacgctcaacgtaagttaacacgtcgcacagtaccaggcggccttcagcgtcggtattcagcacttcaacggtttgaccggacatggtggttaacacatcgcccggacgataggctcgtccgccaggcatgttttcgcagcctgccaacacgccgataacgttaatcggcagttgtagctccgcgaccatccgcatcacgccgtaaaccgctgccgcaccgcacatatcgtacttcatctcatccatgccttctgaaggcttgatcgagataccgccggagtcgaaggttaaacctttacccaccagcacgattgggcgtgcatcttccgacgcgttgcctttgtactcaatcaccgacatcagcgattcgttttgcgaaccctgaccgaccgccagataggaatgcatccccagctctttcatctgctgttcgccgataacgcgggtgataacattcttgctgtagctgtcagccagctggcgcgcttgtgaagcgaggtaagcggcgttacagatattcggcggcatattaccgagatctttcgcggctttaatcccggcggcaatcgccagaccgtgctggatcgcgcgctcaccgctggtcagttcacggcgggtcggcacgttgaacaccatcttacgcagcggacgacgcggttcgctcttgttcgttttcagctgatcgaaactgtagagcgtctcttttgccgtctcgacagcctgacgcactttccagtagttgttacggcctttaacgtgcagttcagtcagaaagcagaccgcttccattgagccagtatcattcagcgtattaatggttttctgaataacctgcttgtactgacgctcatccagctcacgttctttgccgcaaccaataaggagaattcgctcggaaagtacattcggaacatggtgcagcaacaatgtctgccccggttttccttccagttcgccccgacgtagtagggcgctgatgtacccatcgctgattttatcgagctgttctgcaatcggagaaaggcgacgtggttcgaagacgcccacgacgatgcaggcactccgctgtttctccgggctaccgctttttacactaaactccatgcactacgctcctgaatcttaaanacaacggcggtggctacagatagaattgcaagctttcgtaactcatgtccgctgttgcgatgacttcgtgttaatcttaacgttattacggcattggcacgtcagaacaaaatctgagaggtgaatccgttgagtataattatcttagcgacgatttcgacgactcaagagaataaatgacgtttaagccatgaaacaagctaaaatcctgcaaaagacgagtttttacgggcgtatttaaagtgataatcataagatatctggtgcgggagacgctcaaaagccagctggcgatactcttcatcttgcttttgatcttcttctgtcaaaagttagtgaggatcctcggcgcagcggttgacggcgatattccggcgaatctggtgctctcccttctcgggttgggcgtgccggaaatggcgcagcttatcctgccattaagcctgttcctcgggctgctgatgacgctgggcaaactgtataccgaaagtgaaattacggtaatgcatgcctgcggcctgagcaaagcggttctggtgaaagcggcaatgatccttgcggtattcacggcaatcgtcgcggcggttaacgtgatgtgggcgggaccgtggtcatcgcgtcatcaggatgaagtgttagcagaagcgaaagcgaaccctagcatggcggcgctggcgcaagggcaattccagcaagcgactaatggcagttcggtgctgttcatcgaaagcgttgacggcagcgatttcaaagatgtgttcctcgcgcaaattcgaccaaaaggtaatgcacgtccttctgtggtggtggccgattccggacatttaacccagctgcgcgacggctcccaggtcgtcactctcaaccagggaacgcgcttcgaaggcactgcactgttacgtgatttccgcattacggatttccaggattatcaggcgatcattggtcaccaggcggtggcgctcgacccgaacgataccgaccagatggacatgcgcacattgtggaacactgacaccgatcgtgctcgcgcagaactgaactggcgtatcacgttggtattcaccgtgtttatgatggcacttatggtcgtaccgctgagcgtggttaacccacgtcagggacgcgtactgtcgatgctgccagccatgctgctgtatctacttttcttcctgatccagacctccctgaaatcgaacggcggtaaaggtaagctggacccgacgctgtggatgtggaccgttaacctgatttatctggctttggcgattgttctcaacctttgggacaccgtgccggtccgccgcctgcgcgccagtttttcgcgtaaaggagcggtgtgatgcaaccttttggcgtacttgaccgctatatcggtaaaactattttcaccaccatcatgatgacgctgttcatgctggtgtcgctgtcgggcattatcaagtttgtcgatcagttgaaaaaagccgggcaggggagttacgacgcgttaggcgcaggaatgtataccttgctgagcgtgccgaaagatgtgcaaatattcttcccgatggcggctctgcttggggcgttgcttggtcttgggatgctggcgcagcgcagcgaantggtggtgatgcaggcttctggttttacccgtatgcaggtggcgctgtcggtgatgaaaaccgccattccgctggtcttgctgacgatggcgattggcgaatgggtcgcgccgcagggcgagcagatggcgcgtaactaccgtgcgcaggcgatgtacggcggctcgttgctctctacccagcaaggcttatgggcgaaagatggcaacaacttcgtctacattgagcgggttaaaggtgacgaagagttaggtggcatcagcatttatgcctttaacgagaatcgtcgtctgcaatccgtacgctatgccgctactgcgaagtttgacccggaacataaagtctggcgtttgtcgcaggttgatgaatctgatctgaccaatccgaaacagattaccggttcgcagacggtgagcggcacctggaaaaccaacctcacgccggacaaactgggcgtggtggcgctggacccggatgcactctctatcagcggtttgcacaactatgtgaagtatctgaagtcgagcggtcaggatgccggacgttatcagctcaacatgtggagcaaaatcttccagccgctatccgtggcggtgatgatgctgatggcgctgtcgttcatctttggcccactgcgtagcgtaccgatgggcgtgcgtgtggtcaccggtatcagtttcggttttgtcttctacgtactggaccagatcttcggcccgctgacgttggtttatggcatcccgccgatcatcggcgcactgttgccaagcgccagcttcttcttaatcagcctgtggctgttaatgagaaaatcgtaaccgaatgaacgaataaagggagcgaaagctccctttattattgttagcaaagtgtgcttcgttcattcctgaaaaataattaaaattcaatatattgcagtggggtgggcatgataagacgcgccagcgtcgcatcaggcaaagacaaatctcgcctgacttaccttcttctcccccccagcaaactccccaacatcccgcgtacaatctgattcgtcacttggcgagcggcgcttttggccattgtttgcaccacaccatctttcttcccgccgcgtggtccggtagtgccgaacaaaatatccttcaatccaccaagaatgccgtcatccaccgctacctctttccctttcgcggggggattattttgctgctcggtactggcctgaaagcctttttgcaacatctcataggcggattcccggtccacctcatcctcatatttgccatacaccggagagtgattaatcaagccattacgctcatcttccgtcaccggccccatccgcgaacaaggcgcgatcaccatcgcacgctccaccacagaagggcttcctttcgcatccagaaaagagatcaacgcctcgccggtgcccagttcctgaatcgccttttcggtatcaaacgccggattggcccgcatggtttgcgccgcagcttttactgctttctgatctttgggcgtaaaagcccgcaaagcgtgctgaacgcgattaccgagctggccgagcacattatccggaatatcagacgggttttgcgaaacgaaccagacgcccacgccttttgagcgaataagccttatcacctgctcaatcttatccagcagtacctgcggtgcatcgttaaacagcagatgtgcttcgtcgaagaaaaacaccagttttggtttctccagatcgcccgcttccggcaattgttcatacaactctgagagcatccacagcaggctggcggcgtacagtttcggcatctgataaagtttctcggcgctgaggatattgataacgcctttaccgttggcatcggtgngcatccagtctttgatatccagcatcggctcaccaaagaagtgtgctgcgccttgctgttccagcgacaacagcccgcgctggatggcaccaaccgatgcgctactgatatttccgtactgattctggaaagatttggcgttatcgccgatgtactgggtaatcgcccgcagatctttaaagtcgagcagtaacagcccctgatcgtcagcaatgcggaagatgatattcagcacgccagattgcacatcgttgagattcaacagccgcgccagcaacagtggccccaggtctgaaaccgtcgcccgtaccgaatggcctttctcgccaaagatatcccacaccaccaccggattagcatgcggttgccagtcattgacgtcgatatttttaagccttgcgagcagtttttccgacgccgttcctgcctgcgcgataccggtcagatcgcctttcacatcagccataaacaccggcacgccgatttccgacaatgactccgccagtttttgcagcgtgacagttttacccgtccccgttgcgccagtaatcagcccgtgacggttagccattcccggcagtaaaaatagttctgtgtccggcgtgcgggcaattaacaggggttcgctcatgagatatcctccagtttcctgcctggagtataggcaacggctgcgcactcttcaccgctaaattcagcagattgcgagacgccttccaaagagatttaagtgccgggcgacaggcacccggcaaagagatcagaagtcagctttcagaaccacgcggtaacgcgccttaccgtcgcgcacatgcttgatggcatcgttaattttcgacatcgggaacaattcggtagtcggcgcaaccttgctgcgggcggcaaagcgcatcagcttacgcaactcataaggtgtaccggtagcagagccagagacactgcgatcgcccgcaatcagcgtaaaggccggaaccggcaacggcgtgagaaccgcaccgaccgtatggaaattaccgccataggtcagcgcctcaaaataaggctgccagtcgaggctgacgttcacagtattgataatgagatcaaactgccccgacagggctttcagtgcctgcggatcgcggctattcaccactttatcggcacccatcgccagtacttcctgctctttcgccggattagaactaaaggccgtcacctcgcatcccattgcgtgcagaagttttatagcgatatgccccagcccgccaataccaattaccccaacgcggctggtagcagtgatatggtgcatcaacagtggtttaaagaccgtgataccgccgcacaacagcggcccggcggactcgatatcaatattttctggcagtggaatcacccattgccagtccgcacgcaacttctcggcaaagccaccgcgattcataatcgtcggcacagcactttgctcgcagttgatctgattaccgctaatacaggcgtcgcagtgaccacagctacgcgccgtccagccaatcccgacacgctggccgacctgcaaacctttatcctgcgcggcnntcccgagcgccgccacgcgcccaatcacctcatgcccggcaaccagcggatattgtgaaaatccccattcattgtcgatcatcgatagatcggaatggcagatcccgcaataatccacctgcacttcaacatcttgtggcctcagctcaccgggatcgtactcataaacttccagttcgccgcccgcttcttttgcggcatagctttttatcatcgacattttttggtccttctctggtgttgtttgggaagtgtagagcatggcagggcggggtgcctggagtgtgacaaaggttacacatcgctgtatgcaatgctgaaaatttcagcacttagcgaggtgcgagcaagctggcgcttgcatggtggcgtgcgacaggtataatccacaacgttttccgcatacctcttcagtgccgaagtggcgaaatcggtagacgcagttgattcaaaatcaaccgtagaaatacgtgccggttcgagtccggccttcggcaccatacaaagcttttttcaagtctactaacgtctactttagtccataaaaacagtaatttaagcaggtttctggcttttcttagtctgttcacgtctactcagttccttgaacatataccaaccgatgatggtataactgatggtattnccgrttcgatattgcttgtatactcacgagataccaatggaaggaagaccattatggccctaacggatactaaagttcgctctgcgaaacctgaggagaaagagtattcacttgttgacggcgacggcatgtccttacttgtaaaacctggcggttcaaagtattggcgatttcgtttccgttttggcggtaaacaacatttgatggcgttcggcgtttacccggatgtttcactggcggatgcgcggaagaaaagggaagaggccagaaagctggtagctgctggtatcgatcctcgtgagcataagcgtgctgtgaaagaagagcaggcgaaagagattattactttcgagaaggttgccagagagtggctcgtaaccaaccaaaaatggtcggaagatcatgctaatcgtgtaaaaaagagcctggaggacaatatcttcccggcaattggtactcgcaacattgctgaactaggcacccgcgatctgttaattcctattaaagccgtggagaaatccgggcgtcttgaagtggcttcccgccttcaacagcgcaccacggccatcatgcgttatgcagtgcaaagcgggttaattgattacgatccggcgcaagagatgtcgggggcggttgcttccagtaatcgacagcatcgtccggcgctggagttaaagcgtatccctgagttgcttgacaaaatagacagctacaccggcagaccgctaacccactgtacgacagaactcactctgcttatctttattcggtccagtaagctgcattttgctcgctggtcagaaatcgattttgaaacgtcaatgtggaccatccctcttgattggtattgcagtaagcagagggttggactggtacagtaaatatcccgcataatcgtgccattcacatttagagatcctccggcataatcaatctgccaatgaaggagatcgctattcgtaaagccccttttactgagcatcagattatcgccgtgattaaatcgcttgaatacgggcgaactgttaaagatgtggcttatctgaagccacttactacaactgcaagtccagatacggcggtatggaattttctgatattaaaataatcaaggatcttgaggatgagaaccaacgtttcaaatagatgtttgctgatctcattatttggtcgggatttttaaagatgtatggaactaaaacgggtctattttcagagggatttaactgaagcagaaattaatnnnnnnnnntttataggtggctggtatttaatattcctgcnnnanatctctgatgcaggagcagagaatggctataaattattagtaaacagaatgtctatctctcacccacaaacccctcataagggtaatttttacgcacctgcggcaacgcaatagttttcccgtcaaaatcccagaataatctctcaacgatccctccgccgtttaccgcatccgagaccagtacccgcatattttcatccaggccaatcgatcctttatcaaaggctttatggtgtattgcgcaaagcgccagaccattggggatttcacaagggccgccgtgctgtttccattttatatgcgccgcttccagcgcgacggtggtgtcatcgnggcgcatattaaagccacatattgcgcactggtagttataagcgcgtaatacattttngcgaaataacgggtcgcgctgtttacggatttgctggagatcaaaacccagctcgtcagcgatttcttcctgaatactctcggtgaagtgcgcttcgagtatctgttgcgccagagtattgatgagttttttattgccggttaccagggcgtagtgctgttcatcgaaaccgcctgcaacgtggtattcgttcagttccttcactggcggttgtcggctgctccctgctgttgagcaacgctcggcattgtgtaattgccagattccgtcgccttgtaatcgccagaacggcatatcaggtcggtactgtgaacgctgtggcccaaaacgttccagtaaactgtgcagaggttcgtagatttccgtgccataatcgaaaaggcgcggatgtccattcaggtatcccgctaatacgtatagcagtaacaatggtttatgcggcgcgcgctgtttacccttgtgccagatttttatgttggcaattgcctgctgtagcgatttactggaagccattgatatcccaggcagtgaaataattgcaatcatgctcgcaaattttctgctgttcaagcctgcaagtgaagatccattgctgtgttgagggatcaaaagacaacaaaaactnattgaagaaataatcttctgcttttttgtcgaaataatgggcattgatcttgtctatagctgctgaatcttttccagcctcgttgagatcttcaaaatagccattgaagatgttctggttaacaccgccagtaacataagccttgccgttgtgtacaaaagtcacattacccgccatgcccatcggcgcgtgcgacatcaatttattgctttattcattgtgactgtcttctgtctaccaagctttaaccttcacccatatgagggaagttttaagtatgaggcgaaccatagcatatgcttttatacctgttacaccataaaaatcagacaagttatgccataaactacttttgtaatttgagccacaaatcagggaaattttatttatcttccgtgaaagtcttaactttcacggagttttagaatttacaattttgctggcgtaaaggctcctgtttgtatttctttaaccagctcacccacggtatatattctccatccttcgacttcggcgggagtaaggttaactgcaattttaaggcctggccatgcagcttctacggttgcaataatttcatgttctgagttttgaagatctaacccaggaacaggaggttgaaagcctttatgttgcatcatattaatatcaccatgcactgatggatcagtcaggtcatatatttcattccaggattctgcttttaataacccttgttgggaacgtaaacgttgaatgatagccatctctgcttgggtaacgaatataccttcgtggaggggctgttttcgatggcaatccttgcacagaacaagaaggttttcatggtgattatcatatttgatgccatttttatgatggacatggcacaagtttttggcggttgataaattcacgccacaatcattacaaacataatttgccttttctcgtatttctttagatatttccttccagttttcgacatacccactatttgttttgtcatagatacccttaggcatatgacgaaaacaggtactataatctgaaaaaaactcatttaatgagaatgatttaaaaatctctctttttcgttgtttatcaatacttcctttataattaagtcgttcgaggcaattcatacatacccgtaaatcaacatcctggctccgacctgaaccatcatcaatttcgaataaaccatctatgcggttagttgcatgatacctttcaaatcgatttttatggcgcatttcatcaagagttctgcaccaggcaatatgaaaacgttttcctttttcgccatctacgatagccgcatcataacgccctgaatggtcccgaatatataaaagaacctggcggccatgataagagataagcccgctaccagggtcaagatcttcgatactaacttctttacccgtggataactcaatatctataggatcaaagtcaataggggattcatccagaaaaaaatcgactccttctggtaacattttcttccctaattgaataagttctgaaatgtcgatagataatttcatctcttactcctgaataatctttctaatctgcaactcggcatttgttacaactttgaaggtgacacgacgagagcgattaggatcctccttgccggttttatcaagaatgggatgtgcagatgaataacctactgcggcaaatttacttttaacccattgttggtgtgtcgcgatattttttatgtcataaacgtattgtaatactgcacgtgtacgaccttgcgatagtgccatattattaaaataagcaatatcaggattcgttgttcctgtccagtcagtacttgtgtgaccttcaatgcggacttcagtaatatgttcctgataattatctagaacttttaggtagcgaggaaagaagtcgtcaagaatgagtttaaactttggttttagctctgtgcttcctaagccaaataaaacatccggtgatttaaatcgaacctccagagtctgtttatcgatctctgcatcccagtcttgtaaatcctttgcaaactcaatatccagagcattataaagctgtaactgagcattctcgtaggctacggcaacttctttaattttttctttttcaatacgtacgtagtgcatataagcaatagatatgaacataaaaaccatcatcagccctgccattaggtccgacatggatacccaatgttcattatcttgatcttttttaggtaattgtttccctataatcttatccatgatcgattacccgcgatgtttattagcagaaattaatgcttgtaactgccccataactatttggtaatctttaataagtttttcatagttaccgacaaaacctttgctgattgaaagcagagcattacctaatgattgcatttcacggttcatttcacgttcagttgcttgctcaaaagcatgtaactgctcgttgatggatagagcaaatttttcaattgattctctgacttgagaagtcagccctgcacttgccttatcaaatgatgtctggattgaatcaaacatattatcggcattactggatagttgatggttaatcttttcaccagtcttactgaacatatcaatcacattcgtcgtattttgttccatatttctatgcaattctttcgagtgcgactctagtgatttcaggaattcttcaccactttgtttcatttcagtaattgtttcacctaacgtgctggttagggtttcggaggaattgctgacatcatgtgccatcgaggcaaatgcttgttgtgtttgggtaaccgattgtctgaatccttcggtaccttcatccagggcaacgcgcattgaatctgcattaagaagtatttgctggctggtttgctcaagagatgcactaacatttgcagctccggatttcagcagttcacccacttcagccattttgttctgtatttcaggtaatacggttgtagctttatcgcggatggcgacaaaggtttctaaatggcgggagagttcgctgatttgatgttggttcacctgaagcacttcacgcagttcagacatagccagaggaatttctttacattcttcccaaatccctgcaaccgcagtttttgtttcaaccagggactcgacactttgttgatattgttctgacatctgctcaatttgcgttttataatttccctgccactcaacaagtttttttacagaggcatcaagagctttaaagttttcaccaaactgttcagttaaattttgattaanatcaataatgacttgtcgcaaagcatcaataatttgttctgtagcaccttttgccattagatctgcaaattgttcaagttgttcccaaagcttattactgaaatgagtgtgattagctaattgtgcctgcgaggaatcgctaatctcagtacgtagtaattttatttgagcaataagagaaccttcactatcaccgttaatacccgagactaatttagtcagagtctggttctgctcttttaattcatgatagatatgttcaggtgtaacagattcagggttattttctgctaacgcacttcgtttattggcaaaaaagaaagcatccattccattaaataaaatggcaaaaaacatacctacaatgcttgtaatgaatgctgtttttaggccacctaataatacggggatgctggtatcaatactttcggtattaaaattgagtaaaccaataataataccaatgaaagtacccagaatacctaatgcccccattaaggttggagcatattctctaaacttactatgtatattttttttgtcacaccaccacgctgataaaaatacgaatataacagcccagatgaaaatattggtgatcagtgtagagtctatcgattgaaacaactgctcaaaaagctgcgctaacattttgatacctgtgtaaataatggatagttgtaatcgtttaaaaaataaacaaaacacacataatttatatggttaagctcggtgtagcgctcatgattgtaacaagttttttcgagatataaatgatttgtctcatttttagcgagttcatcgggttgagcttttttatgatgatagtaacctgttacgaattgtatcaaaggaaggcaggttgcttgtgaaaactccagttaacccacttttgcaatggcttaacatgttttttagtcgccgttcattatccggagctgatggacgggcgttatatgcttaccgttgtactgatacagagtacgaaagtttggcagaactactgcgtacatatgccccccgtagttatccaagaacgatattcatttcctatagcgatgttctatttagcatatatgccgcagagtttatccgccggactcatacggtcggacaccctaaatgggacacaattttagattctattaactggaaagttccgtatgttcatcgacagaagctggttaatgatggcattcgctactggaaaagaaagataagaaacctgggacaagcttcgggttatctgcatacactggcttgtgaaggtggtttgcctatccgcatgattgaaaatgagagcggttatttgattacctatttcagaaggatatatcaggcgcttcgtgggcaatcatctcaatatcctgccgctaaaattgcacaagaattaggcgatacgattcctgtcacaatgcaaaacgaactggtctatgaaatagccggtgaattctgcgagactctctgccgattacttagtgagcatcctcctcatagcagtgatcccgtttctgcattacgtaagctctctccagactggcatcttcaacttccactcgttctccccgaagcgaatgctgcagagattgtaaggcgattactttctcaatcttctgaaatacgcagtgcaagtagtcttcaggttgaaagaatctgggtcgatgttgatgacagttggtattgcgatgcccgtttccgattcccggccacaatgcgtacagaacagttaacctctttgtttgaatgccatattcagccggagcagacccgactcatcatttcaggaaaatggaaaaatggcggggcaaggttggcaatgctaagccgttatgagcagcaagattggcgggtcgagttattacctattgcgatgcaaaaactctctggtgcagatgcaatggccgaaatctcattgtcgcttcatgaaggtccaattctgttaggtcacacaattccaaaaggcggttatgaacttactgaagaacttccctgggtttttgaagcgatgaatgagagtgaatcgcagctaaaacttgttggtatggggtctgtgagttccaggctaaatgctctgtttatttcgctaccgaaaaatagccatttagatattagtggagaaggtgagtttgatatcccaaggttgctgaaaaacagtgaacgcagcttaactaaaataagtggagtatttagcgttgttttacatgatggtgctgtttgtacaattcgcacccagcaactttatgattctgcgattgaatattatattaaatcgacagaagttgaactggttaaatcggattatcctctccatcgagcctggccgaagatcggttggaaaaaggatctgcaatatggcattgtaccggagaaagaacttttttggcgttccattcgttcaggtaataatgcctggtattctgtcgcatcagaaatgccaaaaggacagatagaagtccggcgaatagttaatgatgaggttttatttagcggtaaagttgtagttttaccagcagacttcgatattaatattatacctgagagtgctcagcaaggcattattatgctttctggtataacggatactagaattgataaatattcaaacaatgaaaaagtaacacttaagtccgattattcacaaaacgagtgtgctatttattataattcatcgctgatgctggaaaataccgttgatttacgggtctcctggaaagatggttctaatcttaaactattattacctaagccggttagcggtggccgatttgtaactaatgatggttctgttcattttgatggtgtggcatctatagcacatttgcatggaatagatgctgagttattaaccatatcatgtgctggaagaggatatcttaatatcgagttattggatgaaaatccagtagctgaaaaattccgctatttacatgccgaccttcctcttttatcaggacgcaatgacaaattacaacaaatttcactttatgagaactataatttgctaaatgctatgctggcatgtgcatggaacagcaatagtacattatgtgttgatttttactctgacagatttggaaaggataaagcaacactcaatattaaacgctacgatggtagttttattgaacacgatcaagggttactggttgatataaaaaattctgttgtttttcctgcaaatagaatagacgaactggttgttgatgctatttctcttaagaatcctggcttacacatatcattgttaaaaaaagatgagtttgcttatgatctttcagctctgaatgttcaggatagtccatggttaattgtgggaaaacttgatggtacagctcgcattgcaccagtaattaaatggatgctacctgtattgcagacaaatgatttattactaaatgctctatgcgaagcagacccagaacagcgcaaannnnnnnttaatgagctaatttttgaaatagataacaacccattgcaaaattattgctgtttattaacagagtatattaagaaatacaaaatgaataatggcttatccttgctggatctggacttgttcagaggtatttcgagtaattaccgcgtggttgttcaattgttaatatcatcatgtctttctggtgatagcgatacgatttatgatatacaggaagaattacccttttcatggggatggattcccgtttcaatctggaaagatgttttccaaaaatgttggacttatctggagaaacagattaacgataaaacattagcattacatatattgcaaccctttattgcttttatgaaccatcgtgcacatatcgatcgtcggctggctccgattgcgaatatgttacttacatatagtgagagcctaccaaccggttgtgatgtattgccaactgttagtcgtgagcagtttaatgaagctaaacagatgctattaaggaaccccgacagctttgggcgtatcagtatcttccctaaagaactttggtctagtgctattactccagagttaaaatctgtttttaataagctttggattgaagataaatatcactcacggcttgaaaaacgttttaatttgatgttagtcgcagcgctgttaacccaaaaagataataacctgatacatcaactgtctgcgctttttgaatttcactatcagcaagccccacagcaattaggggtaatctatcaatattattttgaacaagcaggagtatgtcattgatggacgttcagcaactgcattatgcgccacttctaaatcagcttcatcagcgtgcggtgaggtcggtggtaagtcagttggcattgcggagcaagtcgttgactcattatctggaatcacaatattttcagcctcccggtcaggaggggtcactgcttgcagacccggtattcgaaagtacattcggctggatgcctgcggatgaaacaatggaggatttgcgggacaagctgatctccagcccgctggttgatgcattgagcaaagcgccagtgccatttcgtcatcaacttactgcgtggcgaacgattctggaagacaaaaaatccttgttagtgagcagcggtacgggatccgggaaaacagaatgctttatggtaccggttctggaagatcttattcgtcagcaaaaatcgacccgccagtcactaacagggacacaagctattttcttgtatccgttaaatgcattaattaacagccaacaggagcggcttcgcgaatggacgcgcggatttaaggggaaaatacgcttcgcgctatataatggcgaaacccggcataccaaatacgaaattcaggaagatcagttgaaagtacctgaacaagctttgagtcgggaagccatttatgaagcaccaccttccatcatggtgacgaataccaccatgctggaatatatgctgattcgtcgtaaagatgccccaatcatcgaaaagtctcaggggatgttaaagtatatcgtcctggatgaagcccatagttatattggttctcaggctgctgagttagcgctgcttttacgtcgtgttatgcaggctttcaatgttggacccggcacagataaacctgtgcagattatcgcgacctctgccactattggtgaagactctcctgaaggtaataaggagcttgctaaatttgtcgctgatctcgcgggcgttacagaacgtgatgtcaaagtggttcgcggttatcgacaaataccgcgggtatcggagtcgctgattcgtcatgaataccccacatctttaacttctcttaaatccctgagccctcaggatctttaccaacagctttgtcattaccgtgtggcccagcaattgcgtcaggcgttaactcatcccggacggcaggcagtacgtttgagtgagttgctcaatgttgccagaagaacctggccagatattaatcaccgtgagctactgcaactcctcgatctaatggcaagatcgcgagaaggtgaactggcttttacgccattacgtatgcatgggtttatcagaacactggcgggtctatgggcatgttcaaacaaacaatgctcacataaagcacatgaattaaatcagagtgactggccatttggtcaggtatggtttgagcagcgccaatattgtgactgtggagcgccggtatttgaagttttacgttgctccgggtgtggttcagcttatttgtctgccaaagaggagatgcgcggtgatggaacgaactggttggtagcgcaaccagccgctgccgaagtggatgagtttgctcttgatgtagatgtttattctgaagatgaagacaacgacgaattagacaataactctcaatttgatcgtctgattgcgagcggtggtgaaaaatatatcatttcactggaagaaacgacggcggggaaaattgatagtgaagcgcaaaagcactatgaaataaacctgttaagaccggaatctcgaggtgagggacgcaataactcctttgcttgtgtttgctgtggtgacactcaacggaaaaataatcctttattccgtccgcttcggctcggcgcgcccttttttttaaatgaaattattcctactctgctggagttttctccattaccgcaaacaagagaagagcagttaggaccgtttaatggtcgacgcttgctcacctttacggattcgcgtcagggtaccgctcgcatttcagcccgcttacagcaggatgccgataaagcgacgttgcgagctctttgttaccaggagctggcaaatattacagagccttcagcaaaactcagcccggcacactgtgcactgttagagaaagttattagccagttttctgtcctccctttaaaaaattccatcgacgcgctgaaaaaagcgatggctgcgaatgaggagcttagcccgacggacattcaggcacttaaaattattgagccgatggtgagttccttaagcacggagcatgctgaagcgatgcaaatacttcaggctaactctggcaatcagcagaagaaaaccatgtcatggcaaacgctgtctgaacagctggttggcagtgtggaccttgccgatagaatgagaggcagttttaaagaattgtctgggcttgatcttactaaacaacagtttgcagatttttgtttatacagcgagtttggtcgccgccctaaaaatgcctggaccctcgaaagtctgggtctggtagccattcactatccattcattgataaagttacaacctgcccgcaggactggaagacattattacccgatcccgataagcaattagcggaatggcgtaatttattgaagattactcttgatttctttatccgtgaaaacagtgccgttttttacgaaaacgagcaataccctcgctggatgggggcacgtttcccggtaaaaatgctccaggggccagataaaaaaaacaaagggcagaaacgtgatcaactttggccacaaatacgcgatcgccattataaccgggtcattaagctattaatcgcagtctttccggcaatacaacctgagcaggctcactggaaatcgttagttaaccacttaatgattgaggtctgggatgcaattcgaccctgcttacgtcagtttgagtcgggttatcagctggatattaaacaacaagctgaattttacagtccaaagcaagtgtggcgttgcccctatactcgacgtgcgttagacgtcacgttgctgggatactctccgtatttgccgggtagcaaagaaattgcacctgaaaaagcagtgttgattgaaatgcctgagcttcctgtacgtcactggcgtttgtctggtggtggagaaatcgcccgagaagaacgtctggagtggctggaaagtaatgcgctgattcaacatgcccgcgaggaaggattatggtctactcgcagcgaccgactggccctgaaagatagctggtatcgtctggaggaacactctgcgcagagaacgcctgagcagaaccagtttaatgaaaaacaatttaagtcaggcaaagttaatgtgctgaactgttccacgaccatggagatgggggtggatattggtggtatgagtttggtggcaatgaacaacgttcctccagcgccggcaaattatttgcaacgtgcaggtcgcgcggggcgtcgtggagagagtgcatctgctgccattacgttatgtaaaaacacggcgcatggaatggaggtattcaaagaccccctctgggcgttcaacactactgccagtgcgccacgggttcgttttgggagcagtagtattgttcaacgacatgttaatgccctggttttaggtctgtttttacgagctgaagttcctgatgcgacaaaactgagttgcaaatggttctttgaaggtgatgagagccagtgtcttcgttttctccattggttaaatcaccaggccgatcagctggcggataaacttaaacgccttactcagggaaccgtactgatgtcattgacggcaacccagctcttgacccgcacacaagcaatgatgcagcaggttgatatccgctggagaagccaacttgcgatactgttggaaaatatcgaagcgttgaaggcggataacagcgcgtgggaagaaacaccagcaggtaaagccatcgcttatcagcttcgtgattatcgcggtgcatatctgttttctaaactcattagtgaagcgttcctgccggggcatggtttcccggttggcgtagtcaatttcaattatctgacggcagatgagctggaaaaacgtcgcgcaataaaagccactcaggctgaccctaatgaagggggagaaagcttttctcgtcgtattgaaaaattgcccagccgtgatttgcctacagcattacgcgagtatgcgcctggtgcagatgtggtattgggcggaaaagtatatcgttcctcgggcattatgcttggcaaggtgcttgccagcgggcaggagctgtcaggcgatcatcatattccgtggttctggcattgccgtaaatgtggtgcgggggcaaccagtactacccatcctgtcgaatgtagtcactgcaaagcggatatacagcaacttgatgtgaagcgttatttacagcctgttggttttgcgacagatattcgttatcaggcacataatgatgtatccatgcctgcacaacttccctggaaagatccacgtgttcttgtaccgtcttcggtgtgggtttctttacccgatgctgggctaggacgttaccgttttagccatagtggggaattgttccacttcagtgaaggggaatttgggcacggctacgcaatttgcctctcatgtggtcgggcagaatctcaaactcaaccccagcgtacccctgaaaatctaaagaacccagagagggaaaatacgcattacctgttgcgagggggcagtaacgatcgtcaggggagcaataaattgtgccacggtcatgtgcataaagatctgtggttgggatatagcagtcgtacagatatggttgagctgcaactcaatgatgataatggcctgttgatccgtgatgaggttgccgcgcgttcccttgcggtcgctttgcgtgaagggttagcgcataaattgggtatcgaaaatactgagctgggcgtgacgacgcagcaagcgcgcgatatcaatggctataccggatattccatcttcatttacgacaataatgcggggggtgcaggttatgcagtgcaattgatcgaccattgggctgatgtctttaattacgccagaaaattgctcgattgcagttgcgataaattctgtcaccactgcttgctcagctacgacagtcagcattatgtcaacagattagatcgtcaccatgcattaaccctgcttaccaatgtacggttgcagcgacttaacctcgcgccagaatatcagtacttcggcgatggtagccgggttgaaactaaccctctgagtttacgtattgcgcaatgcctgaacagcgagatttatgactcctgctcgctggttcttgcggggccgcaggaacagtgggactttgcccaatggccattatttaaagagttgctccagtttgcctcctccggtgggaatgttgagttgctggtggccacgccgctggcaaacttaactgatagctccagacatcagctttccgcgttggcggcgatgccgggaggtcgcttacaagtgaaatccattgccactgcgcagctcatgcaaggaaaggggcgctggcttgcgcaggtgactcgcgaagggcaaagccaacagtgggccgcagacgacagcgctaccgttgcacctggtgaattatggggacaaagtgcgtcttcaccagtagtgacacttaaaggaacgtccggaaaaaccttctcgggtcagaccttaagtgcagaagatttactgcccgccttacccaccggggcggtgcgcatcaatctctgtgaacaactggacgggccgctggaaggttttggttcgcgtttctggtcgttagtcacgcaacagcacgctggctggaagcaggcatttacccgccacaaagagataacgcatgttgagtacagcgatcgttatcttaatagcccattcacggcgcgtttgttaggtgaaatcttaaccgagctggttgaacagggaatggcggaacgcgccagcctcactgtttgcgtcaaaaaattggattacaactctcgccaacacgacgctctctataacgcgtggcttaatgaggaagatcgtcagcaggttgtgaccactttacttgaagaaggatatctggggcctgcgtggccgggagcaattagctggttaacgggggataaccagagtacggagcatggacgagaactgacagtcaccttcagcgatggcagtcagcattatgtcctgctcgacatggggcttagctactggcgctgtattgaagataccttctttgattttgccctgcgagtaccgcagcaagttgaacggctggcaaacacgcgagcgcgagctgttgccccgggtaatgaccttaggagttatattatcgctggataaataattgctcccctggggatatcttccaggggagttgacccagctcactttttaataatttttgtttgaaaatcatgcgcaattnntgcgcattccctcccattttgtcactttgccgggggccttcatgatatctttaaggccctcttttttatcgcagtgtgccgcgccacatttttcaggatgacgttaccgccactgccccaaatagacagaaaaaccgatgaataagcaaaattatgcacctggtatgcgggtggttattcgtgatgccgaatggcgtattcgccgggcggatgacagtggtgatggtgggtatttgctgacctgcgatggtatttcagagcttgtgcgcggtaaagaagggttatttctgaccaaactggaacaaaaagtagagatcctggatcccgcaaaaacgcatttggtggaagatgaatccgccaattatcaagcggcacagttgtatattgaaagtcagttacgccaacgcgtaccgacagacagtaaagtccattttggtcatctggcggcgatggattccatgccgtttcagctcgatcctacgcggatggcgctggcacaaccgcgtcagcggatactcattgccgacgctgttggtctgggtaaaacgctggaagccggtattctggtttcggaactgatccgtcgtgggcgcggaaaacgtattctggttctggcggttaaatcgatgctgacacaattccagaaggagttctggagccgttttgcgatcccattgacccgcctggattctgctggtttacaaaaggtgcgtaaccgcatcccaaccaaccacaacccgttccactattttgacaagaccattatctccatcgatacgctgaaacaagacattgaatatcgtcaccatctggaaaatgcctggtgggatattattgtcattgatgaggcccataacgtcgcagaacgtggaaccagttcgttacgcagtaaactggcaaaactgctcgccgggcgcagcgatacgctgattatgctttcagcaacaccgcatgatggtaaggctgaaagttttgccagcctgatgaacatgcttgacccgacggcgatcgccaacccgaaagagtatgaatacgccgattttgccgataaaaatctggttgtccgtcgcttcaaaaaagacgtgaaagatcagatgtccggcgagttccccgagcgcaatattgtcaaattgactcgcctggcatccggtgccgaagaagaagcataccgtcgtctggttgagagccagttccgtgatgatgacgatgaacaggcccagtctaacaaaggtcgtctgttcaagataaccctcgaaaaagcgctattttccagcccgatggcgtgtgccagcgtcgtggcgaatcgtctgaagcgtcttgagagccgtaaagatcataatagccagagccagatcaacgaactggagtcattgctgttggcgctgaataacattgatgctagccagtttagcaaataccagttgctgctcgacaccatccgaaaagacctcgcctggaaagccaataacacggaagatcgcctggtgatcttcaccgaaagtattaaaacgctggagttcctcgaacagcaactgcgagcggatctgaaattgaaagatgaccagatcgccacgctgcgcggcgatcagggcgatacggtattgatggaaaccgtagaagcctttggtaaaacgcagtcgccgttgcgtcttctggtttgttcggatgtggcatctgaagggatcaacctgcatcaccttagccacaaaatgattcactttgatattccgtggtcgttgatggtattccagcaacgtaacgggcgtattgaccgctatgggcaaaaacatcagccccaaatccgctatctgcttaccgaggccagcgaaccacagatcaatggcgatatgcgcgtactggaagtgttgatcaacaaagacgaacaggcgcagaagaacattggggacagttcggagtttaccggcaaatttacccaggaagaggaagaagagcaggttgcagagttcatgatgcaggatgatggtgccagcctgtttgatcaactgctgaacagcaacgtctcggaaagcgccgaacacgatctgtttggcgaaatatgcagtgcggtttccagcgatgcctcaatggtcaccgaaacagacaccagcttgtttgccagcgaacaggcgtactgcgaaagagcattgggttacctgaaagccagtggtcaaactatccagtatgaaaccttgcctgataataccttgtcgctggtggcaccggaggagttacgccgccgnttcaaccagctaccgcctgaaattgccccggagaactggcagctctatttaagtcaggataaaaccgtcatcaccgacgcgattgcgcgcgctcgcggtgagcaacatgcctggcccgatgtgcagtatctctggcaaatcaacccggtagtgcagtggctggacgataaaatctcttcggcttttggtcgtcatcaggctccggttatccggctgccatacctgcttgaacccgatgaagatcacttcattctttccgggttattcccgaaccgtaaatcacatccgatggtgaacccgtggatagtggtgagctttaaccgtgaatcgctaatcggcagtcagcctttcgctgagtttttacaacgtcatccgcagttgagtaacaagctgactaacagcggcggtaaagatcgtaatcaccaacgccagcaggatttactggaagcggctattgctcatgcccgggaggtattcatccatgatcggaatgcgtttgaaacgcacattaaccagcaactgaatgagcatctgcaaaagctggacgttttgcgtgggcggcagttgagccaacttgagctggattttgccgataacaaacagcaattgtcagtcaagcagagccgtaaagagcagagacaacgcgaaatcgaacacaattttgacagctatatcgaatggattgaggacaccatgacgactgaaaaagaaccctacattcaggtaattgctgttatcaccggagcggagggttaatcatggcgctggtcggtattaataacgaaaacgaattttactctaaccactatttgggtgaggttttcaccagtgatatccgcgatgtgctggaaccctggatagcccaggaaaatgcagcgcgtgaagcggagcgtgccgntcgtgaacagggcaaagacgtggagccgggataccgcgctccgtggaaccagtttaacagtctggcgactgagtttttccgcaaacttgccgagcacgaaaaacagcgtcagatcccgcagcgtctggccgatcaacgtaatcgctggcagccattgttaaaggcgctgggctacgaaattacgccacagatccaaatgctggatgacgatacaccgctgccggtactggcgcgttacaacagcactgacggtagcccgtggctgtggattgttgaagcacacgatcaggaagaaggaacgctggatccgctggcgctctccttactgaccgcgcaattcccggcggataccgacaaacataagcacgacagcctgcgcaaaaaagccaacggtgaatatcgcagctggcaggatttgctctctacggcggtcttcacccaaaatgaaccgccgcgttttgtgctgctgctcggtaaccgtcagctattgttgttggaccgtactaagtgggcgcaaaaccgtctgctacgttttgattttgaagagattttaagccgtcgtgaaacggatacgctgaaagcgactgcggtgttgttacataaagattctctgctgccgggcagtggggcaccttatcttgactcgctggatgacaattcgcacaaacatgcgtttggtgtttcggaagatctgaaatatgccctgcgcgaaagcattgagttgctgggcaacgaagcgatgcattatctgatcgaccgtggcctggcaaactatacaggtaatcgtgcggtggacccggatgaactgagccgcgaatgtctgcgttacatgtaccgcctgctgttcctgttctacattgaagcgcgcccggagctgggttatgcgccaatgaccgccaaaacctatctgcaaggttacagcctggaaacgttgcgcgatctggagatgatcccactgaccagcgaagaagatcgcaacgggtgctacttccacgacagcctgaatatgctgtttaaactggtgcgcgaaggctacaacggcggcgtgaaaatgcagagtgacctggagagcggcgaccggatcaccatccatagtcatcagttcagcgtcccgcgtctggaaagtcatctgtttgatgccaacaacacgcgcattcttaaccgcgtggtattccgtaacgaaaccctgcaacagattatccaggcgatgtcgttaagccgcccggccaaagggcgctttaaccgccgcggacgtatttcttatcgccagttgggtatcaaccagttgggtgcggtgtatgaggcgctgctctcctatcgcggattcttcgccagcgaagatctctacgaggtgaagaaagccggggaagagtttaacgagctggagacgggttacttcgtcagtaaggatgagattagcaaataccacgaagacgagaaggtctacgagaaagacggcagtctgcgcattcaccgcaaaggcagctttatctaccgtatggccgggcgcgaccgtgagaaatctgcctcttattacaccccggaagtgctgacccgctcactggttaaatatgccctgaaagaactgtttaaggagcagattgatcccattagcgatccgcacgccaaagctgatgccatcttaaacctcaccgtgtgcgaaccggcgatgggcagcgcggcgttccttaacgaagccatcaaccagctggcggaagcgtatctgttccacaagcagcaggcggaaggtcgccgtattccgcaggatcgttacacccaggagttacagcgggtgaaaatgtacattgccgacaacaacgttttcggcgtggacttaaacccggtggcggtggaactggcggaagtgtcgctgtggctgaacgccattagtggcgatgcgtttgtaccgtggtttggttaccagctgcactgcggtaactcgctggtgggcgcgcgccgtcaggtgttcaacaagagcgaactgacctacaaaaaagccaaagatccgagctggcttaacagcgagccggtcgaactggcgatgaacacgccgcgtgaagagacgcagattttccacttcctgctgcccgacggcggtatggctaactacagcgataaaactgttaagcagcgttatccggatgacttcaaagcgctggacagctggcgcaaagagtttattaaaagctttgccgggcatgagattgctgatgtgcagcgtatcagcgaaaaggtggaagcactgtggaacacctatcgccagcaacttaaagcagaacgtctgaaaaccgccgacagctacccggtgtggccggcagaaaacagcgagcagacgcgttcttcgctgagcagtaaagatgaaacctttagcggtcgtcttgaagataacagcgcctaccagaagctgcgttgggtaatggactactggtgcgcgctgtggttctggccgatcgacaaagccgatgagctaccggatcgcggcacctggttgtttgagattgaaaccctgcttgacgggattgtaatcacggaaaaagtcactgaagttgcggagcacaccaccggcgatctgtttgccgaagaaggcctgctgcgagaagagtcttcgctgttttctgttgctggtcgtctgaaaaccgaggtgttgttccgtcatttgccgcgtctggcgattgtcgatgccctgagaaagcagcaccgtttcttccactgggatctggagttctgcgacctgtttgccgagcgcggcggttttgacctgatgctcggaaacccgccgtggctgaaagtggaatggcaggaagcgggcgtgctgggtgattacgagccggaatttgtgctgcgtaagctgagcgcctcgaagctggcaacgttgcgtattgatacctttaaccagatcccggcgctggaagcggcctggcgcagcgagtatgaaggctgtgaagggatgcaaaacttcctgaatgcgcagcagaactacccggtactgcgcggggtgcagaccaacttgtataaatgctttctgccgcaggcctggcgattaggggcgcataaaggcgtggcaggtttcctgcacccggaagggatttatgatgacccgaaaggcgggcaattacgtgcggcggtatatccgaggctgagggcgcattttcagtttcagaatgagttaaatttgtttgttgaagttgatcaccatgcgaagtttagcagcaatatttattctgctagccctagcacagtgggatttgaacatatatctaatttgtatgctccgcaaactattgatgcatgttttgaacattctggcagtggggacattcccggtctcaaagacgagattgagagcgagggaaaattaaaagttgtatggaacacatctggccaccgttctcgattaataagtatcgccactcatgagctagaattatttgctcgtctatatgacagcgaaggaacgccagcctggcaggcacgtttgccagccttacatgctaaacaacttgttgctgtactggaaaagtttgctaatcagccgaatagattaggtgatttgcaggggcagtatttttcaacggttatgttcgatgaaacatatgctcagagggatgggacaattttacggcagactcaattccctcaagattcatcacaatgggtactgtctggccctcatttctttgttgggacgccgttctacaagactccgcgcgaaaactgtacgcttaacagcgattatgactgcctggacttgctaactctgcctgacgactatctgccgcgcactaactacattccggcatgtgatgcacaggagtatgcaaaacgtactccatgcgttacatggactgaactggctgaagatgaaccgaagaaggtaacagattattatcgcttagctatcagagccatgttggctcaatcgggggaacgtacactaattagtgctatttatccgccagaaataagtcacatgaacgcagtacgttcttactgctatagctcacagaatctgttactcgaacattcaggtatgtgtttttctttaccttttgattttatttgtaaatctactggcaaggcaaacttacatcagatgcttgatggtttctcatacgtattattcaatccgagacaaaaggcattattatactgcttagtattatcattaaattctgtaaatgatgtatatgctggcctttggcaatcctgctacaccccagacttcaacacccagcgttggagccgcgatctcccgcagctcccccaggatttcttcgccaaactgaccccagagtggcagcgtaactgcgctttacgctctgactacagtcgtcgtcaggcgctggtggaaatcgacgtattggtggcgcaggcgctggggttaactctcgaagagctgcttaccatttatcgcgttcagttcccggtgatgcgccagtacgaagcggatacctggtacgatcaaaacggtcgcattatctttaccccaagcaaagggctggtgggcgttggcttgcctcgcaccgcgcgtaaagctgacctgaaaaacggctttgtctttaacgtcgacagcccggagtggaccggcggtgactgcaccgatcaagctatcggttgggatgatgtcaaacatcttaaaaccggtaccgtcagcgtcacctttgatgattatacccgcagcgacgaaggtgagcgccgtaccgtcacctggcaggctccgtttatcaagccagatcgcgaagatgactacaaagtggcctgggcgttctttgcacaagataaggagagcgcctgatgttgccgtccgttgtcagtcggcaggtcgccgacagcgttgccgcctttttacgggcggcgttcccgctaaacagcccgctgtttaacggtgagaataacgataatgtctcaatgctggagcaatttctggcccagccggaaacgctgctgaaaggaccatacctttccgcccagttgccgtttcgtaaaagtgacttaccgctgaattttttccctaatctgacgctgccgttcccgccgcacgcgcatcaggcccgggcatttcagcgtctgggaagcgacgcgccacagccgacgctggtcgcaaccggtaccggstccggtaaaacagaatgttttatgttcccgctgctcaaccactgcgcgggcgcgtcacaagccggggttaaagcgattatcatctacccgatgaacgccctggcaaccgatcaggccagccgtttcgccaaaaccatcgccagcgatccacaactgcatggcaaggtgaccgtcggcctgtttgtcggcgacagcgaaatcgaacccagcaaaaaaatgtcggcagaaaaggtcattacctgtaagcacacgctgcgcgaaagcccgccggacatcctgttgaccaactacaaaatgctcgactacctgctgatgcgccctggcgatcagccgctctggcgttacaaccagcccggttcattgcgttacctggtcgtggatgaattgcatacgtttgatggcgcgcaagggtcggatctggcctgtctggtgcgacgtttgaagcatcacataggtgtggataaccaacgattcgcctgcgtcgggacatcagctaccgtcggcgacgaactggggcaactgctcgattacgcaaaaacaatctttgaccagccgtttaccgatgacgccgttattcgcgaagatcgctacacggcagcggagtacttgcagaattacgccattgcgtacagtcagtatccggggccggaggtcgcttcggccctggacccgcagagttacgctaccccggtagcgtatcttaacgggcaaatccctttgtggttccccgacagcgacttgcaactcccggacgatctggagagcgacgacgggcgtgaaaagcgtattgcgctggggtcactgttacgccgccacagcgtgatgcatgtcttactccatgatctgcaaggcgggatcctctctgaacgagagtgtctggaaaatctccaggtcatgctggcagaaagcgccgaccatgcccgacgcgtgctgcaaagcattctggcactgatcgcgcaggcacgtctcgaagtaccggaaacggaacacgatcggcaaaaacgtctccaggcgaagaaagcgcgtccggtgctgccgtttgtgcaactgcgctcccagttgtggcttcgtgagatgcgtcgtctggtcgccagcgtggcgaaaacgccccgactggtgtttgccgatgatgtggcggtggaagatcgcgaacactatttgccggttatccactgccgtgactgccacgcaactggctgggccagcctgcgtcatgggcaaagcgttcagttggaaacagacctcgacggcatttatcgccagttctttgaaaaagggcgctccatcgtccttgctttcccggataacaacgaaaaagcggtcagtggcgcacaccagaaactgtgtcctacctgtctgaaactgaaccgacagtccagcgtccagtgtggacattgcggtcatatggaactgttgcaggtactgatcccggatatgctcaaagagcgtaaggacgagctggagtttgctaatgaatgcccgtactgcaacagcaaacaggggatttcgattctggggtcacgggctgccagtctgtcggcggtgatgattcaccagctttatggcagccagttcaacgaacataaaaagctgattacgttttctgactcggtacaagacgccgcgcatcgtgccagcttctttactgcccgtacctggccgctgatgattcgtgggcaaatcgccagtgttcttagcgaaaaagagacattaccgctggatgcgttcgcggcgcgtgtttgccaacaaacgcgtgaacgttcaccggacgatgctcattttgcagcaaacttcatcgcaccaaatatgcagtggctgaatgattatcagacgctgaaaaatgaaggcaaactggcggagaactccgatctgccggagctggtttccctgcgcctcgactgggaggtgtacagcgaatttaccctgcgcgcgcgtatcggacgtacgctggaagccaccggttatgccgttgccggagtggataaagatcgcttcaatccggcaattaccgccctgcatcaacagctttgtgaagagctgggtgatgagatgtctggtgtgagcgtcgagcaggtagcgcacctggcgctgggggttatctggtatcaacgccaggccggggccgttatgcatccggcgttcgaaagttatcgccgtgatggcacgacctttatgatgacgcaaaaagagcgtacctcgcgctatatgccttctatcggtccgaaaacgcgtaaaccggcttatgcgtcgtttgaaaaaattaatggtttccatcgcctgattggcgcgaagtctaaccccagttggtatcagcattggatcaatcgcacgctgagtaacggcaataatctgtttatcagtagcgttgcggaaacagtgttacgacgcctgtttacggcgttgaaaatagccggagtagtaaaagattttgacaccaaagggcgtgaagcctggggactggtgccttcggcgctggtggtgagccgtgacgttgttcagcttaattgctcatgttgccgtgaggttgtccgggctccggccgatcaaggctggcagtggcgtaatgcgccttgtctctctttacgttgtgaaggtcgttaccaggaagtcgacaatacggcgacctggcgttgggagaacatggacatcgcgcgcgtacagggcgcagaacacacggggctgcttagccgtgaagatcgcgaagtcaccgaaaaatcgttctaccgcggcaaccaaccgtggaatatcaacctgttgtcggcaacaccgacgctggagatgggtattgacgttggggatctttccaccgttttactctgttctgtcccacctgctcaggccaactacttgcagcgtattggtcgcgccggtcgtaaagatggtaacgcgttaaacattaccgtggcagaagggaacccgcacgatcagtttttctttgaagaaccactggagatgatgcagggccaggtgcaggctcctggcgtcttccttaatgcaacggctattctcgaacgccagctggcagctttttgtatggataactgggtgaaaaccggtgtaccagaatccgctatctgtaaaaacgtcaaacagatgctggatgagctggagttcgggcgtaaatcgggttttccgtataacttactgcgatatatcgaacagcatcatgcggagattgctgcgcaatttacggcaatcttccccgatcttgccgcagaaactcgccaacagctgttgtcttatcttcagggcgcgccaggacaaagctcgctggtgcagcgtatcgaagaagcgttaaaactgctggtggaagatcgcaaatctttgcgctcacgcatcgataaactcaagcgcagtatcgataaactggagaacgcgccgcgcgatcaaaactttgatagcgatatgcgcgagttaacttcggaacggcaggcgctgatggcgctggtcaatcaaatcaacaataagcaaacgctgaatttcctcacggatgaaggtctgctgcctaactacgccttcccggaagccggtattacgttacgttctgtgctctggcggcgtaaagaaggcggggaagcacgtgaatatcaaaacaccactttcgaatatgaacgcccggcatcaacggcgctggctgagctggctccgctgaataatttctatgccggtgggcataaagttgaaattgagcagatagacctgaaggtctctgagccggagaactggcgtatctgtagccactgtaactacagcgaaaatatcgaccagacgggcgaccagcataaatattgcccgaaatgtggcacaccggggtgggccgatgccggacaaaaaaccacgctgctgaaacttcgccaggtttatgcccgcgccagcgcacgtgatagccagatcagcgacgagagcgacagccgtgaacctgctttcttccagcgtcagctattggttagtttcgaaaaagaagatgtatcggcggcatacgcgattgaggaaggcgaagttccgtttggttttgaatttttaagcaaagtcaccctgcgggatatcaacttcggcaaaatggcggatgatgccaatgagttgatgattgccggagaagcgaagaagcgaaccgggtttaaagtttgcctcgggtgcggcatggtgcagcgtcctcgcgatcatgaaccacgtcatgatttgagctgcaaatatcgcacggaaccggaaaaggcgaagttcgaagattatctctacctctatcgccagctggagtcagaagcgttgcgtattctgctcccggtaagcagttacagtaatgaccgtgtcgtggaggcttctcttggggcggcgatccagctcggtcttaaacattacttcaaggggaatgtcgatcacctgaaaggcgttgtgtaccgcgagccggaaaatgaaggcgaatcctggcggcagtatctggtgatttacgataccgtcccgggggggactggttctcttaaagaactgatgcgcactcccgacaatttgctgaaattacttgaactggcctatcaggcaatagtggaatgcagttgcaacaatgatacgcataaagatggttgttatcgttgcgtttacgcttaccgtgaccgtgggcgcatgaagtatgtctcccgcgatcaggcgcgtctcttgctggcgaaaattttgcaggcaagagattcgatacgggtaattgattccatcaaaaacatttccctcgaagccatgatgggcagtgagctggaaaaacggtttattagctgcctgcaagaaaataaaaacctgattgtcagtcgcagttacgcgcatcagggcgctgggtggattattaacacccgcagcgaaccgatgatgagctggcatcttaaagctcaggtggatttaggcgctaaagaggcggtggggatcccttgtcgcccggattacgtgctatatccgcttatgcagtctgatgccattaaaccggtggctattttccttgatggctttgcgttccacaaaaatagcgtcgcagaggatgtgcaaaaacgccaggcgattcgggatagcggtaatttctgggtgtggacagtcacgtgggccgatctcaaagagccagggcttaaacatgttcaggatgtcctgggacttgggcataacccggatatgaaacagcctaagttttataacctgtttcatgataccaactttgcggcccttgaagcgtcgttccgggaacgcaacagttttgcactgctgctggattatctcgccgatccgggcggaagaacgcagttatggcagagaatggctgctgcacatgcctgggtgtggttggatgtgaagaagtcacaggacgcgggaacgaaacaaaagtatgcctatgaaatgcaggaaaacgcgccagcttggcggctagcagagcttttgccagacgaaccgtttgtctttggtggtttactcgatagctgtaactcatcgccgcaatttattgagctggcttcggtgttaccacaacaagccattaaaccgacgaccagcgtcgcacaaatgcgcagctggctgcgtttgcatatctgttttgacgatcgctatacgcaggatgacggttatgaagcgggactcaatggcttctggcgactggtaaacctgttacagttcctgccggatatgacctttaccagccgtaaagccgtgcatttaccgcaggaaagcgttgacactaaagtttcggcaacgccagaggcagtaccagagactgatgagagttgggctgagattattgagtttggcttattaagcgctgaagagatcgcgttgcttcagtctcattctctctctgcgccgactctcggctacgaattgcaaaatgatgaaggtgaaattattgcggaagccgatctcgcctggccatcacaaaaatgggcattgattattgataatcaagaatttattccattattcacaaccaggggttggcacgttgcattcgggccaattgacgaaaatacattgcaacatctgtccggaggtgacaaatgacggtgcaaacgcccaaggtggcactttctgatggttttctgggcgcattcgcgcggatcccaaaggcacagcaaaaaaaggtgcaggaattcatctccaaattccgtcaggacccgaccagtaatggacttaactatgaaaagatccacgatgcgcgcagtaaaaatgtccattcggtgcgaatcgatcaaacttatcgcggcattgttctgaaacctgaacagggtgccctgtatatgctgatgtgggtggataaacacgacgaagcatatgactgggcgcggcggcatgattgttcaattcacccggttaccggcgcgattcaggtcattgatattagctatatcaaaccggcagcggaaacagtggttgataaaccgaaactcttcgctgcttacagcgcggaacagattctggctctgggtgtgccgcctgtctttattgatcaggtgatggcgcttaccgatgaagccgggcttaatcaacttgaaagcataatgccagcagaagcctgggaacctctgcactggctggcagaagggctggattaccaggaagtgctggaagagtttaacgatcatcgtgatgagcctgttgataccaacgactttatggaggcgattgaacgaagtaaacgtcgcttccatgtcgttgaaaatgaacaggagctgttgcagatgcttaatgcgcctttagaaaaatggcgtgtatttctgcatccgagccagcgaaaattggtggagtcgcccgctaatggtccggtacgagtactgggcggtgcaggtacagggaaaacggttgttgcgatgcaccgtgcgcggtggttatctcagcgtctggcagataaacccggtaagaaagtacttttcacgacctttacgcgtaacctggcggcagatattcgcgctaatctccagcggttgtgtacgcgagaagagatggcgcgtattgacgtcgttaacattgatgcctggatgagcgaccaactaaaacgccacggttatgatttccgcgtggtatacgacagcgatgaagggcgacgcaaatgctggaactatgccttgcagcaggcacctgccgaactggggctacctgataatttctatgctgaagantggcaacgcgttgtccagccaaatgcggtttacacccgggaggaatacctcaaagtcagccgggttggacgtggtacagcgttatcccgtattcaacgggcgaaaatctggccagtctttgaagaattcagagcacaaatggcgcgtgccaaactgcgcgaaatgggcgatgccatgcatgaggctattgttctgtttaaagaaaagcaggtccaactaccttatagcagtattgtggtcgatgaagctcaagatatcggtgccccggcatttactcttattcgcagcctggttcccgagtcgcccnacgatctgtttattgtcggggatgggcatcagcgtatttatcgcaataaggtcgttcttggtcagtgtggtattaacgtccgtggtcgtcgcagtaaaaaattgaagattaactatcggaccacagaagagacgcgtcaatttgctgttgggctgttaactggtgtgaaggttgataacntcgatggcgaagcggataccagtaatgattatttgtcattactgcacggggaaaagcccatgattacgcatgcggcagatttcaaagaagaggctgcaacgntcgtcaagcaaattcaggcattgctggcgaatcaggttcgttctcaggatatctgcattactgcgcgtactaaacatgnttgtgaccgctacgcatcagcactgaatgacgccggaattgagacatttaatttaggcaatgatagcggtgacagcgatgcacgccctggcgtgcgggttgcaacgatgcaccgtattaaagggcttgagttccagtatgtgttcctggtggggattaacgaaggcgttgtgccggaaataaaagcattagcatccgatgatcccgttgaacagcgtgatgcattatntaatgagcgcgcgttactgcatgtggctgcaacccgtgccgtaaaagggctgtttgtttcatcatctggtgtccctagtccgctattagtggctgactgataatatgtccaaaacaggccaggagccgaaacgctcctggtctatataaccgttctggcaactggcgatatttatattgcttagctcccaacagccagacaatatcaacttagaaattatattcgcttatgcggtttgcatattgcacagtacaacctgttttctctatatctaacgtaacgtcaggatgtggatgattttgggatggggtgacacactggacaaatatagctggcacgaaaaggctggcatttccagctgaccaatagtctctggaaccatgatgatgataaaataaatatcttaagttttaaacgtatgatgccaggattaccagaattataaacgaatatattagttcttttctatttgttcaggaggggtataaaaattgcaattgttaatagtatcgtcaggacgataaaaagataatcatgacaaaggcaattgaactaaaatgattgacattttacaggtggtttgtcagtgatttcttgttattcataatttattttccgtaaaaaatagnnnngtgatcacctgaataaaggtaatctcatattttgatgagtatagtgattttttatttctctggtgaggaatgaaggaaatatcaatggtaaggaacgtcagagaatcagggaaaattaaggtccctcagaaacacaatgccgttcacttaagcggggcggcactgtgtttcacaggataacgggtttttgatatcttaaccgccctcgcccttgatggtcgggggcgttttgttatgaacaccacttccagagcccccgcagatgctccagtcgtttcgggatagtccccggtgacgccgtgtttcccagcactatcatttctgtcacgataaactggaacgcgaacttaaagctgatctctgacgccgcttttgttgcctcacgccgtatcgctccgccggtaggcgcggtcatggcattcagtagaatgtgattcccagattcattaacgccaccagacgcatgacggggtaggcgctctgccgctcagtggatgtgttggcagagccataatattcacgcagctcgggttcatcaggtgtcctgaactgtgcgccatcaatggcaaaaagttgcaggccgtgccagtcatccttcaggtaacgttccgcgccccatgtctgtgtggtctggcggaagagccattccaccggggcggcccccacgcgctgacgcgcctgggtgacagcgctgcgggcgccagcaggttcatccccgcttcgccatccacgctcaggttaagacgacgaacggtcgcatgagcagaaagcgtcaggaagtgctgtatccactcggtgggaaggtgctctgcaaacagttgcgtagagggtggtggcataagcggatggtcactgaaagtggtataagaaaatggctccttgttgtggaagtcgttatagtgccgcacgccggaggagttaaaagcgctgatggatgcgaataaatcaaattaatgaacgctcacctttcgcgccaaaactgcaaaattgcttctacaaacctgtcagaaataatcccccgacgggctgctgagctgaaatgactgcttcgcantgccgtcgtccagttctccggtgaccggtacgctgaaccgtaatatcccgtgcttaaatcgtccggatcttcatcaggcgcgttcgtcagccctcttgcaccttgttgctggaagtcgacgaaaataatattagctaaaatattattttgataattgccataaatagcttcatacgcatgagggaaattttctttccagtaccaggtggtatcgccgcaaaaccacggcgcgtcagtaatattattaagctgagaatggtattgttttagatccctacgaaaggcttcaaccatatgattaaagtgttgaggatgtgacgcgtagtcactggtcattaagtcaaattcgccttgcatccagcatacgccgaggaatttgttctgcggattttttaccagtgcggctcgcgttctgctgactaaatcctggtatagcggagtatccgttccccaacgacaagcatcatggctggctccgtgccgttctgaatatgtcccctcgctgcctgcggtaaaagccgatccgccacggcaacacggaacgatgagaatccctgcattatcaggaatgaagggcagtaatttccgtgcaatatgcagtgcctggccaacggtgccgtactgtgtttgatgattcgttgccagaggatggtgataactctgcatatcctgaacatcgtgtgggcagtgagtcagtggaataatgtcgttaaagtgacatgacgggcctccgggatgcgtatgcgcaaatctcgctaattgtttaattctgggatgaggcgcatcttccctgtccggtaatggcagtccttcgccatacgccatggcattagactgaccagcaacagtaagaacatagtaataatcaggcgatattattgcgttcatataaatttcgcgtaattgaaatgacaaattgatagcagggcccctttaccggggccctgaagcgttagttttgtactgtgactttattatccttcacagagatcaaaactgaatccgtcaccgctttgccgcctgcagtttcaccgccaataatcaatagactattattccagggcaatgatactccgtaggcccgaccttgcgataattcacccgatttatcccatttcccgttatgccaaagatgaatatcagtgctatatgattttttcaggccttcatgcgcatagttcttaccgttttggtaattttctcgtgaacctttgaatccggcccctccggcaaatataagagaatcattgcttatccccgcaaaaccgccagcgacgccatctggtgatgagacgggagcaagcctattccattttaaattattaccggtgaaatcaagttcaaatacggcatccgttcgcaatccgggtttggcttcgccattaataagccaggttttatcacctttattcacaaccgccgcaccagccgtcccgtaccagggagattcgccagcgtaactccattgctgtgtagagggatcaaaagacaacagaaacttattaaagaaataatcttctgcttttttgtcaaaatagtgtgcattgattttatctacagcggttgaatcttttccagcttcgttgagatcttcaaaatagccattgaagatattctggttaacaccgccagtaacataagccttgccgttgtgtacaaaagtcacatggcccgccatgcccatcggcgcgtgcgatatcaatttaacccagctattggttttggggttgtatttgtgtacgtcattaaatacctgagtcaagccctcgctgtttttgccaatgccgccaaacacatacagattgccatcaataaatgccgaggttgcttgatctcttggtccaccagggaatgcagctaacgctgtccattttttatctttggcctgtgtctccagcttgtaccatgccgtacctgcgctacctaaaccaatgtagacagtgtcgttatcaattgctccggtaccacttttaaatggtacaggagtttccggtaatacagacgcgtttgcggcaaatgaagccattaggatagcaagcgccgttattgttttattcattgtgactgtctcctgtctactacagtttaaatgacacaccaatgcgataactgttttccgataaattatctctgccgttgtaaacaccctgacggtccaggtagtcatattctatgtatggcgtaatatcgggcgtcatatggtattgtagaacaaatgcattttccgtcgcccatttcttatggtttgcatagcgataatcgttctgtttgctgtatagcgtcgtttgccatgcgaaggtgaaatcactattaatatggtaagtgacatatccatcccaacgatgaacgttatcacgagacatatcaccggataagtcttgttgtcggtaagctttccagtcgtaacgatagcgaatgccaaaattaagatcttttgtcgcgtcccaggacagttttacgtagggtccgtagcgtgtgccgttgctgctaaaatgcgttaacattcccgggcgcaccgtccattgatcatcaagtttaatcgcgtaattaacttcaacctgaacatcattgagtgcggcattttcctttttattatcatgaatggtattccaggtattactttccatgcttgcccaccatccattttgccatccctcactgactttgagtcgagtctcataggcgtggcttccactacgatatccaccacgtacgtccagtgtcgcagcctgagaaattaatggtgacgaaaagcacagtaataatacgccagaaagtattttagcctttttcataaatttcactcatttgtaggatacagaaagcaatacaaagcccgcataaacaattagcatttatgttgtgtaatatttttttgccaggcttatagtgtctttggcaaccggtagctgtattttatattttttgtataatgtctcctgtgaaaaatctctttccacattatttaaataaacagagagccagattaaatacctgagtataaaatctattctgatgtttaattgatttgaatgttcgtaagctatatcacttactcaattcattttacccagagtcataaaatagagtgtctgttgatctcattttcatattcctttcagactgaagtgcgttttcatcacccgatgagaaagaactgaagtgatgtttgccatagattgcaagatgccctgtctcattgtctatcgtggtgcacctttatacctgttataccagatcgaaaatcacgcaatccatacagcaaaaccagatttgcaattcgtgtcacaaaatatgtcgatctttttctaagaagaagatgccatgtgaagccagacgaacacttgcggtggtcttcaaaaactaaagatcttcgtttaactatttgttttataaataatttatttagagtctaaacaagggaagctttgcaagctaactcagtgagcttggtgtaaatcagtgtttacccgccatcaggctgagcataattctcatcatgaaatatgtttcctggtttgtggcttgtaactggtcacttctgaagtcgatctggagaggcttattgatgttggtgttttcaggatgatgtttcacttantttgtttgccgtatcgcccggcgaatggctgtgattgaggaaggtttaagtcgtagtgaccaaagctatatttaccaacgaatgtagatgaaaaaatcatctcctgcgttcccccatatctccaggataaaaaggaatgtaacaatctcatggcgtaagctgacgaatcagccaggaataatcgctagggacctaagaattagcttgataatagccactaagaaattactgtgttccatgaaatagccattttgtggcaaatggagttgactaataatgtcatatgtgagacggctagttgaacgaatattaaattttgctgaattttttatgttgattttacttgttacagaacatatcacatgatatatagataagattagttgcattaatgatgagggttattattagattcgtatccgattgataaatatataaaggtacatagcatgcaagagcatagcgtttgtntggcaannttattataattaactgttgctactccatttaagttcactcagaagaactggtccacttacgttagttattaagcaaacgttcgcttttataaacataatcaggataaaaatgttggattattgctaacccagcacagctagtgcgcgtctgtaattataagggaaaaacgatgaagaataaggctgataacaaaaaaaggaacttcctgacccatagtgaaatcgaatcactccttaaagcagcaaataccgggcctcatgcagcacgtaattattgtctgactttgctttgttttattcatggtttccgggcgagtgaaatttgtcgattgaggatttcggatattgatcttaaggcaaagtgtatatatatccatcgattaaaaaaaggcttttcaacaacgcacccgctattgaacaaagaagttcaggctttaaaaaactggttgagtatccgtacttcttatccgcatgctgagagcgagtgggtatttttatcgcgtaaggggaatccgctttctcggcaacaattttaccatattatctcgacttccggtggtaatgccgggttgtcactggagattcatccgcacatgttacgccattcgtgtggttttgctttggcgaatatgggaatagatacgcgacttatccaggattatcttgggcatcgcaatattcgtcatactgtctggtataccgccagcaatgcagggcgtttttacggcatctgggatagagccagaggacgacagcgtcacgctgttttatagagatagttgagataccagggatggtgttaaaaactacattattcttacgatatatcaaaaatgattaaccatttattaattgatgttattgtaagtatgattcttaattatcataataaacattangttaaccatatccatacaaaatncaatggtttatgttcttcaaaataaataaacanaatcattcataaattnacacatcacttaaactctcctgtttctgcactttttcctttattttttaagcaactggaagttaatccactgcaatctattgttatattgaatcaaatcaatgaaaatagatgttatcacatcagtgatattttatttttgtatgatatttaatgtaattgactgatagccacatcacttcgtgtgtggttatctttttatctattgggctaattttgaccgattgaggtttcctataggtattcattcaaatatatctcagttaggagtactactattgtgagtaaacgtcgttatcttaccggtaaagaagttcaggccatgatgcaggcggtttgttacggggcaacgggagccagagattattgtcttattctgttggcatatcggcatgggatgcgtattagtgaactgcttgatctgcattatcaggatcttgaccttaatgaaggccgaataaatattcgccgactgaagaacggattttctaccgttcacccgttacgttttgatgagcgtgaagctgtggaacgctggaccctggaacgtgctaactggaaaggcgctgaccggaccgacgccatatttatttctcgccgcgggagtcggctttctcgccagcaggcctatcgcattattcgtgatgccggtattgaagctggaaccgtaacgcagactcatcctcatatgttaaggcatgcttgcggttatgaactggcggagcgtggtgcagatactcgtttaattcaggattatctcgggcatcgaaatattcgccatactgtacgttataccgccagtaatgctgctcgttttgccggattatgggaaagaaataatctcataaacgaaaaattaaaaagagaagaagtttgatttaacttattgataataaagttaaaaaacaaataaatacaagacaattggggccaaactgtccatatcataaataagttacgtattttttnnnnnnnnnnnnnnnnnnnnnnnnnnnnnnnnnnnnnnnnnnnnnnnnnnnnnctgtttgatatgtaaattatttctcttgtaaattaatttcacatcacctccgctatatgtaaagctaacgtttctgtggctcgacgcatcttcctcattcttctctccaaaaaccacctcatgcaatataaaaatctataaataaagataacaatagaatattaatctaacaaataaactgaaaaagtttgtgcgcgatgctttcctctatgagtcaaaatggccccaaatgtttcatcttttgggggaaaactgtgcagtgttggcagtcaaactcgttgacaaaacaaagtgtacagaacgactgcccatgtcgatttagaaatagttttttgaaaggaaagcagcatgaaaattaaaactctggcaatcgttgttctgtcggctctgtccctcagttctacagcggctctggccgctgccacgacggttaatggtgggaccgttcactttaaaggggaagttgttaacgccgcttgcgcagttgatgcaggctctgttgatcaaaccgttcagttaggacaggttcgtaccgcatcgctggcacaggacggagcaaccagttctgctgtcggttttaacattcagctgaatgattgcgataccaatgttgcatctaaagccgctgttgcctttttaggtacggcgattgatgcgggtcataccaacgttctggctctgcagagttcagctgcgggtagcgcaacaaacgttggtgtgcagatcctggacagaacgggtgctgcgctgacgctggatggtgcgacattcagtgagcaaacaaccctgaataacggtactaacaccattccgtttcaggcgcgttattatgcaatcggcgaggcaaccccgggtgctgctaatgcggatgcgacnttcaaggttcagtatcaataacctacccaggttcagggacgtcattacgggcagggatgcccacccttgtgcgataaaaataacgatgaaaaggaagagattatttctattagcgtcgttgctgccaatgtttgctctggccggaaataaatggaataccannnngcccgnnggaaatatgcaatttcagggcgtcattattgcggaaacttgccggattgaagccggtgataaacaaatgacggtcaatatggggcaaatcagcagtaaccggtttcatgcggtaggggaagatagcgcaccggtgccttttgttattcatttacgggaatgtagcacggtggtgagtgaacgtgtgggtgtggcgtttcacggtgtcgcggatggtaaaaatccggatgtgctttccgtgggagaggggccagggatagccaccaatattggcgtagcgttgtttgatgatgaaggaaacctcgtaccgattaatcgtcctccagcaaactggaaacggctttactcaggctctacttcgctacatttcatcgccaaatatcgtgctaccgggcgtcgggttactggcggcatcgccaatgcacaggcctggttctctttaacctatcagtaattgttcagcagataatgtgataacaggaacaggacagtgagtaataaaaacgtcaatgtaaggaaatcgcaggaaataacattctgcttgctggcaggtatcctgatgttcatggcaatgatggttgccggacgcgctgaagcgggagtggccttaggtgcgactcgcataatttatccggcagggcaaaaacaagtgcaacttgccgtgacaaataatgatgaaaatagtacctatttaattcaatcatgggtggaaaatgccgatggtgtaaaggatggtcgttttatcgtgacgcctcctctgtttgcgatgaagggaaaaaaagagaataccttacgtattcttgatgcaacaaataaccaattgccacaggaccgggaaagtttattctggatgaacgttaaagcgattccgtcaatggataaatcaaaattgactgagaatacgctacagctcgcaattatcagccgcattaaactgtactatcgtccggctaaattagcgttgccacccgatcaggccgcagaaaaattaagatttcgtcgtagcgcgaattctctgacgctgattaacccgacactctattacctgacggtaacagagttgaatgccggagcccgggttcttgaaaatgccttggtgcctccaatgggcgaaagcacggttaaattgccttctgatgcgggaagcaatattacttaccgaacaataaatgattatggtgcacttacccccaaaatgacgggcgtaatggaataacgcagggggaatttttcgcctgaataaaaagaattgactgccgggtgattttaaaccggaggaataatgtcatatctgaatttaagactttaccagcgaaacacacaatgcttgcatattcgtaagcatcgtttggctggtttttttgtccggctctttgtcgcctgtgcttttgccgtacaggcacctttgtcatctgccgaactctattttaatccgcgctttttagcggatgatccccaggctgtggccgatttatcgcgttttgaaaatgggcaagaattaccgccagggacgtatcgcgtcgatatctatttgaataatggttatatggcaacgcgtgatgtcacatttaatacgggagacagtgaacaagggattgttccctgcctgacacgcgcgcaactcgccagtatggggctgaatacggcttctgtcgccggtatgaatctgctggcggatgatgcctgtgtgccattaaccacaatggtccaggacgctactgcgcatttagatgttggtcagcagcgactgaacctgacgatccctctggcatttatgagtaatcgcgcgcgtggttatattcctcctgagttatgggatcccggtattaatgccggattgctcaattataatttcagcggaaatagtgtacagaatcggattgggggtaacagccattatgcatatttaaacctacagagtgggttaaatattggtgcgtggcgtttacgcgacaataccacctggagttataacagtagcgacagatcatcaggtagcaaaaataaatggcagcatatcaatacctggcttgagcgagacataataccgttacgttcccggctgacgctgggtgatggttatactcagggtgatattttcgatggtattaactttcgcggcgcacaattggcctcagatgacaatatgttacccgatagccaaagaggatttgccccggtgatccacggtattgctcgtggtactgcacaggtcactattaaacaaaatgggtatgacatttataatagtacggtgccgccggggccttttaccatcaacgatatctatgccgcaggtaatagtggtgacttgcaggtaacgattaaagaggctgacggcagcacgcagatttttaccgtaccctattcgtcagtcccgcttttgcaacgtgaagggcatactcgttattccattacggcaggagaataccgtagtggaaatgcgcaacaggaaaaaccccgctttttccaaagtacattactccacggccttccagctggctggacaatatatggtggaacgcaactggcagatcgttatcgtgcttttaattttggtatcgggaaaaatatgggggcactgggcgctctgtctgtggatatgactcaggctaattccacacttcccgatgacagtcagcatgacggacaatcggtgcgttttctctataacaaatcgctcaatgagtcaggcacgaatattcagttagtgggttaccgttattcgaccagcggatattttaatttcgctgatacaacatacagtcgaatgaatggctacaacatcgaaacacaggacggagttattcaggttaagccgaaattcaccgactattacaacctcgcttataacaaacgcgggaaattacaactcaccgttactcagcaactcgggcgctcatcaacactgtatttgagtggtagccatcaaacttattggggaacgagtaatgtcgatgagcaattccaggctggattaaatactgcgttcgaagatatcaactggacgctcagctatagcctgacgaaaaacgcctggcaaaaaggacgtgatcagatgttagcgcttaacgtcaatattcctttcagccactggctgcgttctgacagtaaatctcagtggcgacatgccagtgccagctacagcatgtcacacgatctcaacggtcggatgaccaatctggctggtgtatacggtacgttgctggaagacaacaacntcagctatagcgtgcaaaccggctatgccgggggaggcgatggtaatagcggaagcacaggctacgccacgctgaattatcgcggtggttacggcaatgccaatatcggttacagccatagcgatgatattaagcagctctattacggagtcagcggtggggtactggctcatgccaatggcgtaacgctggggcagccgttaaacgatacggtggtgcttgttaaagcgcctggcgcaaaagatgcaaaagtcgaaaaccagacgggggtgcgtaccgactggcgcggttatgccgtgctgccttatgccactgaatatcgggaaaatagagtggcgctggataccaataccctggctgataacgtcgatttagataacgcggtcgctaacgttgttcccactcgtggggcgatcgtgcgagcagagtttaaagcgcgcgttgggataaaactgctcatgacgctaacccacaataataagccgctgccgtttggggcgatggtgacatcagagagtagccagagtagcggcattgttgcggataatggtcaggtttacctcagcggaatgcctctagcgggaaaagttcaggtgaaatggggagaagaggaaaatgctcattgtgtcgccaattatcaactgccaccagagagtcagcagcagttattaacccagctatcagctgaatgtcgttaagggggcgtgatgagaaacaaacctttttatcttctgtgcgcttttttgtggctggcagtgagtcacgctttggctgcggatagcacgattactatccgcggctatgtcagagataacggctgtagtgtggccgctgaatcaaccaattttactgttgatctgatggaaaacgcggcgaagcaatttaacaacattggcgcgacgactcctgtcgttccatttcgtattttgctgtcaccctgtggtaacgccgtttctgccgtaaaagttgggtttaccggcgttgcagatagccacaatgccaacctgcttgcacttgaaaatacggtgtcagcggcttcgggactgggaatacagcttctgaatgagcagcaaaatcagataccccttaatgccccatcgtccgcgatttcgtggacgaccctgacgccgggtaaaccaaatacgttgaatttttacgcccggctaatggcgacacaggtgcctgtcactgcggggcatatcaatgccacggctaccttcactcttgaatatcagtaactggagatgctcatgaaatggcgcaaacgtgggtatttattggcggcaatattggcgctcgcaagtgcgacgatacaggcagccgatgtcaccatcacggtgaacggtaaggtcgtcgccaaaccgtgcacagtttccaccaccaatgccacggttgatctcggcgatctttattctttcagtctgatgtctgccggggcggcatcggcctggcatgatgttgcgcttgagttgactaattgtccggtgggaacgtcaagggtcactgccagcttcagcggggcagccgacagtaccggatattataaaaaccaggggaccgcgcaaaacatccagttagagctacaggatgacagtggcaacacattgaatactggcgcaaccaaaacagttcaggtggatgattcctcacaatcagcgcacttcccgttacaggtcagagcattgacggtaaatggcggagccactcagggaaccattcaggcagtgattagcatcacctatacctacagctgaacccgaagagataattgtaatgaaacgagttattaccctgtttgctgtactgctgatgggctggtcggtaaatgcctggtcattcgcctgtaaaaccgccaatggtaccgctatccctattggcggtggcagcgctaatgtttatgtaaaccttgcgcctgccgtgaatgtggggcaaaacctggtcgtagatctttcgacgcaaatcttttgccataacgattatccggaaaccattacagactatgtcacactgcaacgaggctcggcttatggcggcgtgttatctaatttttccgggaccgtaaaatatagtggcagtagctatccatttccgaccaccagcgaaacgccgcgggttgtttataattcgagaacggataagccgtggccggtggcgctttatttgacgcctgtgagcagtgcgggcggggtggcgattaaagctggctcattaattgccgtgcttattttgcgacagaccaacaactataacagcgatgatttccagtttgtgtggaatatttacgccaataatgatgtggtagtgcctactggcggctgcgatgtttctgctcgtgatgtcaccgttactctgccggactaccctggttcagtgccaattcctcttaccgtttattgtgcgaaaagccaaaacctggggtattacctctccggcacaaccgcagatgcgggcaactcgattttcaccaataccgcgtcgttttcaccagcgcagggcgtcggcgtacagttgacgcgcaacggtacgattattccagcgaataacacggtatcgttaggagcagtaggaacttcggcggtaagtctgggattaacggcaaattacgcacgtaccggcgggcaggtgactgcagggaatgtgcaatcgattattggcgtgacttttgtttatcaataaagaaatcacagggcattgctaatgcaggtacgcaatattacctgaagctaaaaacctgcacgttagccctttgtaggccagataagacgcgtcagcgtcgcatctggcataaacaaagcgcactttgccgacaatccgaactgagcctgccattggcaggctctggtgttcttttacgctaccatgctaataatcagcacaataatcagcccaaccacggagttgaccagctccagcagaccccaggttttcaacgtgtcttttaccgacaggtcaaagtaacctttgaacaaccagaaagatgcatcgttaatgtgggtgagggtgttggaacccgcagccgtcgccagcaccagcagcgccggattcacgccaaccagctgaccagttgctggatcaaggattgcagcactgataatcccggcggcggtcatcgccgaaacgacaccctgacccgtcgccagacgaattagcacagtgatcagccatgccataatgtagggcgagatattgccgtgggacatcaacatgccgatggtgtcgccaatgccggtgtcgatgatagtttgcttcagcacgccacccgcaccgatgatcagaatcaccattgcaatactcttcaccgcgctttcaaaagcgttcatcacccactgcatgtcatgaccacgcgcggtgccaaagagtacgaatgcaaccaccatcgcaataaacatcgcaatcggcgaggaaccgataaagttaaccacttcccaggcaggggtatcttttaccagccagatattggcgatggtggtagagatcataatgatcgccgggatcagcggcaccagaatcgaaacgccgaaagagggcagattgttcatatctaccggttgatctgctttcaggaatgatggcgttgggcgctcaagattgccgaggaacttcggcaggatcagacctgcgcagattacacttgggatcgtcaccagtacgccatagatataaaccatccccatatctgcgccataagcattcaccagcgccaccggacccggctgcggtgggaacagtgaatgtgcggtagtggcagctgctactgccgggatcgccagtttcaggaacggaattttagcttcggcggcaatgacaataaccagcggcgctaacatgataaaggccacttcatagaacatcgccagaccaaaaatcaggccgatgataatcaccgacagctgtacatagcgcagaccgagacgcgccagcagcgtatgcgctatctggtgagccgcgccggagtcgaccatcaatttaccgatgaccgcaccgaacaccacgatgatagccagttcccccagcgtgttgccgaagcccgctttcatggtgtgcagcagcgacatcaaatccatgcccgccagcatcccgacggacagcgccgccaccaacaaagccaccattgaattgattttgaacttcaaattcagtaccagcatcagaccaatgccgaataccacccagagaatgttaagcacatgcataacgttttaccttacctggttgaaccgttgttattttgggcgacatgttatgtaaattggtcaaccattgttgcgatgaatgtcacatcctctgatcaataaccatcgattaccctttgctgcaatttgcagcaacaaccatgagagtgaaattcttgtgatgtggttaaccaatttcagaattcgggttgacatgtcttaccaaaaggtagaacttatacgccatctcatccgatgcaacgccacggctgcggtctggttgttcatccggatacctaaacaactccagggttccgcgtctctttgctgtggaacccactatgtgaaagaggaaaaatcatggaacagacctggcgctggtacggcccaaacgatccggtttctttagctgatgtccgtcaggcgggcgcaactggcgtggttaccgcgctgcaccatatcccgaacggcgaagtatggtccgtagaagagatcctcaaacgcaaggcgatcgttgaagacgcaggcctggtgtggtctgtcgtagaaagcgtaccaattcacgaagatatcaaaacccacactggcaactatgagcagtggatcgctaactatcagcagactctgcgcaacctggcgcagtgcggcattcgcaccgtgtgctacaacttcatgccggtgctcgactggacccgtactgacctcgaatacgtgctgccagacggctccaaagctctgcgcttcgaccagatcgaattcgctgcattcgaaatgcatatcctgaaacgtccaggcgcggaagcggattacaccgaagaagaaattgctcaggcagctgaacgcttcgccactatgagcgatgaagacaaagcgcgtctgacccgtaacatcatcgctggtctgccaggtgcggaagaagggtacaccctcgaccagttccgtaagcacctggagctgtacaaagatatcgacaaagccaaactgcgcgaaaactttgctgtcttcctgaaagcgattattccggttgccgaagaagttggcgtccgtatggctgttcacccggacgatccgccgcgcccgatcctcggcctgccgcgcattgtttccaccattgaagatatgcagtggatggttgataccgtaaacagcatggcgaacggtttcaccatgtgcaccggttcctacggcgtgcgtgctgacaacgatttggttgatatgatcaagcagttcggtccgcgtatttacttcacccatctgcgctccaccatgcgtgaagataacccgaaaaccttccacgaagcggcgcacctgaacggtgacgttgatatgtacgaagtggtgaaagcgattgttgaagaagaacaccgtcgtaaagcggaaggcaaagaagacctgatcccgatgcgtccggaccacggtcatcagatgctggacgacctgaagaagaaaaccaaccctggttactccgcaattggtcgtctgaaaggcctggccgaagttcgcggtgtcgaactggcgatccagcgcgctttctttagccgttaatacccaccggcatggctgcgcgccgtgccggctccttcttccttgccngtcactctctgaagacggattctggagtttacgatgactactattgttgacagcaatctgccggttgcccgcccgtcatgggatcattctcgtctggaatcacgcattgtgcatctcggttgcggggcgtttcaccgtgcgcaccaggcgctgtacacccatcatctgctggaaagcaccgacagcgactggggtatctgcgaagttaacctgatgccaggcaacgaccgcgtgctgatcgaaaacctgaaaaaacagcaactgctgtacaccgtggcggaaaaaggcgcggaaagcaccgagctgaaaattatcggttcgatgaaagaagcgctgcacccggaaatcgacggctgcgaaggtattctcaacgcgatggcgcgtccgcaaacggcgattgtctccctgacggtcacggaaaaaggctactgcgctgatgcggcaagcggtcaactggatctcaataacccgctgatcaagcacgatctggaaaacccgactgcgccgaagtccgcgattggttacatcgtcgaagccttgcgtctgcgtcgtgaaaaagggctgaaagcatttacggtgatgtcctgcgataacgtgcgtgaaaacggtcatgtggcgaaggtcgcggtactggggctggctcaggcgcgtgacccgcagctagcggcatggattgaagagaacgtcaccttcccgtgcaccatggttgaccgcatcgttccggcggcgacgccagaaaccttacaggaaattgctgaccagctgggtgtttacgacccgtgcgccattgcctgcgaaccgttccgtcagtgggttattgaagataacttcgttaatggtcgtccggactgggataaagtgggcgcacagttcgttgcagacgttgtgccgttcgaaatgatgaaactgcgtatgctgaacggcagccactctttcctggcgtacctcggttacctcggcggctatgaaactattgccgacaccatgactaacccggattatcgcaaagcggcctttgccctgatgatgcaggaacaagcgccaacgctgtcgatgccggaaggtacggacctgaacgcctatgcgacgctgctgatcgagcgtttcagcaacccgtctctgcgtcaccgtacctggcagattgcgatggacggcagccagaagttaccgcagcgtctgctggacccggtgcgtctgcacctgcaaaacggcggcagctggcgtcacctggcgctgggcgtggctggctggatgcgttacacccagggcgtggatgagcagggtaatgccattgacgtggtcgacccgatgctggccgagttccagaagattaacgcgcagtatcagggcgcagaccgcgtgaaagcgctgctgggcctgagcggtatttttgccgatgatctgccgcagaatgccgactttgttggcgcggtgactgcggcatatcagcagctgtgcgaacgcggtgcgcgcgagtgtgtggctgcgctgtaactaactgattaccctacagacttactggtcaatcaaactgatatttggttgaccagttttcgtttttttgcccacctgtacgtgccaacttccagtgctaatggtatagtttgagattaacgggggccgtaaaattgcccgttgtangccggataaggcgttcacgccgcatccggcaaaaatttgattaaccgcacctaacggacacaacaccatgaaatctgccacctctgcgcaaagaccttaccaggnagtcggggcgntgatccgcgatctgatcataaagacgccgtacaatcctggtgaacggctaccgccggagcgtgaaattgcagaaatgcttgatgtcacgcggacggtggtacgtgaagcgctgatcatgctggagatcaaagggctggtggaagtgcgccggggtgccggtatctatgttcttgatagctcaggcagccacaacacagacagtccggatgccaacgtctgcaatgatgcgggtccttttgagctgttacaggcgcgtcagttactggaaagtaacatcgccgagtttgccgccctgcaggctacccgcgaagatatcgtcaaaatgcgtcaggcattgcaactggaagagcgtgaactggcttccagtgcgccgggcagcagcgaaagcggtgacatgcagttccatctcgctattgccgaagcaacgcataacagcatgctggtggagctgttccgtcagtcctggcagtggcgggaaaacaacccaatgtggatccagttgcacagccatctggatgacagcctgtatcgcaaagagtggttgggcgatcacaaacagatcctcgccgcgttaatcaaaaaagatgcccgagcggcgaagctggcaatgtggcagcatctggaaaacgttaagcaacgtctgctggaattctcgaacgttgacgatatttattttgacggctatctgtttgattcatggccgctggataaagtcgacgcctgacttatnnnnnnaagcgcaagggtaaacgttccttgcgctttcttaaattaagaagtcgcaatgagtattactttgtaaattgcagggtattgtttaaatatctatataacctgaatgttagtactcattcttctcagtggttatttgccaatataattccattcaccattttttaattcaaacagttctggaagagatgacggttgcagagtcatgcgtttgagtggcgcatcttcatcaccggggataactttatatcccatttttgcatggatctccgcggtacctggataggcttctataccaattattgggtcattacccaactcaatattagcattaagtaatgcggcaagggcgaatccggaagaatttgctacccctgagacagttattatctgatcaatatagatatcaattcttggctgctcattggtccatctttttgcctgagaagctggaagggttgaaatatatcctgtcgtggttccggcgtaacctggaacattgcaaccagggcctaatgttatttcatgaactgtatagtcctcaacaggatcgaaagggctcttcataaataaatttagccgtaaaccttctgctaactctgtagcagcatgcgcctttttacatataccaccatatatttcgtctaaagctgaggtgattttcaagtttcgatagagcatacgtcctgttgttgtaataccatcggattctctgcatgcttctgtcacataattaaatggccaggattctttactaatatcaagttttctaatttcgacaacgctttttccatcgtaattatggttattgccacgagcaagaggcagaagatagatattttccgtatccaggcgtgcacgttcatatttacgtgttaactcactttcgacttttggatgatgaaggaagtgattatctgtaataatttgactctgaaggacattgcttaatggcatagacataatagttaccttttatgagtatttcactgatgtttagaaaaatagataaatttttctgtagtaaaaagagaagtaaacaaatgacatgcatgtttctgttgtagtgatatcaactctacacagtgatattaaagggtaggaaacactctaagtatcaaaaaacgctcatttaaaattatttgcatgcaatttaaaatcatatcttattactaattggaatttgatgttgctatattgaggtctatattaataatgcctgtgaatggtgtttttgatgtatttgatatgttatcaatttatattatttacaaactaattgtttcaaataatacatggctgattatgcggaaataaataatttcccaccggaattaagtagcagcggtgacaagtattttcatctacgtaactattcggaatattcagaatatactagcggtttttttttgagtttgatgatttttatcaaatcannacttttttcctgaaaagtcagtagatattcataggcaagtaaggttttatactttgctgacaggattcaggcctgtctcagactgacatggatgtaatgaacaaaagggaatggctatggaaaatgagcatcaatacagtggtgcccggtgttcagggcaagccgcatatgttgctaaacgtcaggagtgcgcaaaatgatgcgccaatcacttcaggctgttttacctgaaatttcaggcaataaaacgtcattgctgcgtaaatcggtatgcagcgatctcctcactctttttaattctcctcattcgacattaccgtcattacttgtttcaggcatgcccgagtggcaagtgcataacccgagcgacaaacatctccagagctggtattgccgtcagctgcgttctgcactgttatttcatgagccacggattgcggcgttgcaggttaatttgaaagaagcgtactgccacactctggcgatcagccttgagataatgctgtaccacgacgatgaaccgctaacgtttgatctggtctgggataatggcggttggcgcagtgcgacgcttgagaatgtcagctaagcacaatctccagctcgcgcagttcacgccagaagcgttcggcaactggattcatgcgggtattcatccggtatgcgtaggcctgaatcgggatcaccagttcgtcccgattcagcacaacgagctgcccgctgcgaatttcttgttggatggcatactccggcagccaggcaatcccacagccgtcgagggcaacctgctttaaaagctcgctcatcgaagagacaaaaaaggtgctgaaacttaactcactgtggcgcgtcagggtgcgattaatcaatcgccccatgtaggagttgcggctgtaattcagtaacggaaagtgtggctgcacgaggttaaaaagtgcttctccatgttcgtcactggcgcagacagggaacaattgagattcaaataagcgaatgtggtcaaacggcgcttccagcaaatcttcgtcgtgaaaggaaaaaatacagtcactttgtccttcacgcagtttatcgaccgcttcatcgacatcaatggcttcaatcgcccaggtaaagagcggcggcatctggctgataatggacggtaacagaccgagggaaagagagtgtgcagcggctatcttgattttacgttgcgcgtaatcgctgccgccacgcagctctgcaaggttgctttctaactgttgcaacagatggcggatctgcgaatggaagattttcccttgttctgagagttgcagcggcgtcacctggcggttaaacaattcaacgccaatcgcctgttccagcgcgcggatgcggcggctgaatgccggttgcgagacgttacgactgactgccgcctgggaaaaattgcggcatttttccagggtcagaaaatcttaaagccatttggtttcaatattatgcaaaaccgcaccacagtcatccattacgttttactctgtcagccgcccttgggggcattctacgtccattagggcggctgacaaccgtttaagccgtttcaaacgttcctttcacgcaggctttgccgtctttgaccatcagtttgccgcgagcgtatacctgctcaatgcgcaattctggcgtcatgaccagtaagtctgcgtcattgcctggcagaatttcgcctttcccggtcaggttaaggaaaccggctacgctactggtgagcgggcgcagggcatcgctgatactgaaatcatagtctttaaccagcacctgcacggtttccagcaacgtttcaaaacctgcaacgccgatatgggttaaattcccttcatcatcgaagaacggctggctaccgttgccgtcggagctgagggtgacgcgtgccagcggaatacccgcctgaacggcgcggacaataccttcggcaggggcgaccggttcgtcaatgctgctggtgatatcgatggtgccgcctttgcgcgcgaantccagcgcctgctcaaacaacggtacgttgcggttaacgtgggtcggcagcagcttgctgatcggcacatcgcagttttccagcaggtcataaataggctgtaatgcctttttactgtcgcccatgtggaacacggtgacgccaggtttaccgccgagcaaaccgccaacgcgggattctgccgccatattagccaggtgataaacgtccggtgcggcagaacggtgatcagagatggcacatttcacgccaatcacacgatcgataatcgccacgtctttttccacggaacccgtaatggtgcgggaagggacatgataagcgccggtcagcatccaggcgctgatgccttcttcattgagcgcacgggtcttggcgagcagggattccgggtggcgagagatagagtcggtgcccagcagaccaaccactgacgtgacgcccgcttccgtcaggcgacttagcgccacttccggcgtgcgcgtcgtgggacctgcttcgccgccaccgccaatcaaatggacgtgttgatcaataaaacctgggcagaggatctgcccgctgagatcgacaaccgtgcagtccggtacaatgtcagaagggatattactggcaacggcgataattttgccgttagcgacgaggacatcgcaaattccccgatcttccggcgcatacaaatgcgctccctgcagcagggtaaaaccggctgcggtataatcaatcatggtaactccttgttaaacaataagctgcataacccagatcgacagcaatgcgttaatcacgcagaccgtaatgatatgcgggtaatatttggcattcacttcggctgtccccaggcagcgaccgacattttgcaccgggttgcccattaaatacatcgcgggcagtaaaacggtgacatcgtgaccggttaatgcgccagcggttgccagactggcggcaacaccgactgcgccgcccatactcattaatgcggctaaaaggacggttgccgcttcaccgggtaatccccacagcgccattacgggttcacagatatgccccacccagtcgagcaggccggtaatttgcagcgcctgaatgatgacaaacgccatcaccacgtttggcagcaggttggtcgtggcgatagtaaagccacggcgcgcgccatcgataaacatatccatgacgtttttgcggacctgagttgtcatgcttgcgctccttgcgttgggttgcgacgttcttcgaagttaagccagacgcgcaaaatgttggctccgacaaatttaaacaccaggatgacggctaaaggtacgattacggacgtgcccagaaaggcgaataccgcgacgccggaagagaagtagttggtgatgatggcgctaccgctggtttgatatgcggcgaaaatcactttatcgcgttcggtaatttcaccttcctgcgccagctctttggtcataccggcggcggcatcagtgttttgcaagttagcgatcagcgccagcgagcagatccctggaatgcccaacaacggttttagcacaggtgtcattaactgctgcgcggcgcgtaatccaccaagaccatcggtaattgaaataatccccagagagagaatgactgacggtgccagctccagcgcaaagagaaagccatctttagcccccgcgccacccgcgccgcgaaatgaggtggtggctccattcgcaccaggcagttgcccaaacgatccgttcagaacggaaaaatcaaaaacgcgccaccagctgtctgttccggaaaaaacaccggaaaaaaagattatggtgagaaaaaaagccagataccctttaatgcccactttttctgtcgccagctccccggctacagcatccccttgttgtgtcataacaatccccattgtttttttgtgtttgtgtgttgcttgagccaggaaaattcctggaacttaaaaaccttatcatccatgtgggtatggggaaaatgcaagtatgtttctggctatgcgttttttgcataggggaaaaattacgctgtgtggaaaaggttctgcgcaggattgagttgcagaaaattcataaacccagtgacaatgacattggtaaataaaaacagaaaatccagggacgaaaacgcgatggcaaagtacaacgaaaaagagctggcggatacgagcaagtttttaagttttgtcctccgacacaaaccggaggcgattggtatcgtactggaccgtgaaggatgggcgaatatcgataagctcatactttgtgcccaaaaagcgggcaagcgattaacccgtgcattgctggataccgtggtcgcaaccagcnannaaagcgttttagttattccagtgatggtaggtgcatccgcgcggttcaggggcattcgacttcgcaggtcgctatttcctttgccgaaaaaacaccgccacagtttctctaccacggtacggcaagccgtttccttgacgagataaaaaaacaggggctgattgcaggggatcgtcattacgtgcatctctctgctgatgaagcaacggcacgcaaagtgggagcaagacacggatcgccggttgtcttaaccgtcaaagcacaggaaatggcgaaacgaggcatccctttctggcaagcggaaaacggggtctggctgacatcaacggttgctgttgagtttcttgagtagtcgtttatgccggctggggtacaaaaacaataaattcaatatattgcaggggttatataggcctgataagcgcagcacatccggcaatgtagcgtttgttatcagtctgaaaggataccctcgtaaaagggtatcctttaataacaactgctgaaattaaagtgatttacggcaggcggtcagttgggggctggaatcagcgtcgcttccggtcataccggttagcatctgcacatagtagtgccgactgtaatcatcagattcacttgtccagtaagctcccggtgtaaattgcgaattactggaaaacgctccaacgttcccccattcaccatacagtgatccctgcgtgcgtttgttttcgccagacgtcaaatgtgtgatgccaggaagattatatccatcatttttagcatgacagagcgcattggcagctagccagatattggtatgatttccattattcacccaccagcctttcagcttaattaaggtctggtaggttgtacctccttgtcggggaacagcgcttattgtgactgacgtttgatcgccgatatttgcgaaagaaactttacccgaagcatcgacagacacccaaccctgtgaacttgaaaacatataatcatcaacggttttacccgcttcaaagttatcattgttgagtgtgtaatacgcccctgcaaagccttcgctcgggaatttagccgtggagaaggtatggttgtttgcagtgacatgaccggacatttcttttatcgattggatgagattcagcgatatgcttaagtttgcctgatgaaccccgttcagcatgggaatgagtgtcgctgttccctcttttccgccagtgacagtcacggtgtactcgccataatttctttggctgtaatcaatatcgctcaacttgagaaagttcacgaaggggcctgactggacaaattccagatgatcagacgtcactatcgggttaccgtacttgtcttgcaatgttagcgtaagttttgcgctctgctggtantcagccttcagagtgtcaacatcggatttcaaaattgacttactttcatcggccgtgccggcaaccaatgtaatggttgcggattggttggctgtgccaggaacttgcacattgactgttaaggtttctgccaatgtactggttattgtcgccgtgacttgcccggactgatcggtacgcgtagttggaatattaactaccgggctgcctttggtgtctaagccatgactaatatcgacaccttcaaccgggaatccgtaatcatcttctactcgtgaagtgatggtgctgctatcgatgccgtcggcggtgatggtgtcaggagaagccacgacgctcacaacatgtgccgttttagcatctgccttaaccgcaaccgttacctggctctgaacgggaacatctttgcccattatggccgtaacggtatagacattcactttgtcactggtcagcgtcactttggcctgacctgactggtcagtaaggacttcccctgtattgcttagcgttgcaccttcaggcgttacgctaaaggtgataatttgccctggcatcaattcaccccgcgcatttctcgccgttgcggtcagcgtaataccctcactattatggaccgtagtttctggtttcgatgatgttaactcgagtttgccatttgccacattcacgtcaaccttactactactgttattgtccagcgttgccgtcacctgataaaccccaggttgggtgctgagaaggttaacgtacgcanaaccgttattatcggtgtaagccgtatcgcctatcgtaatgttagttgttggctgcgcacttaatctgacgcgttgacccgcgattacattgttaaacgcgtcctggacgagtatccgtagcgtgatgttttcgcccaccgttatcgttttttcggctccggttatacttattaccttcgccgaactttcatccggtagcactgataaactaaacgttttattatcggaagcttgcgctttccggctcaccacgacgttatgttgtccggcaatattgctggtcattgttaccgtcgcctgacccagcgtattggtggtgacttctgtttcgcttagagtgacatcgttactctggaaagtgaccaactggtctttaagcggattttggtaagcgtccaggatcgttgccgtcagggtactccccgtactgttacccgcaacaatggaatttaatgaggcagtcagcggctggagctgcgcactgtttgtatccccaataaaagtgacttgctgataagcaacggtattatttctggtcagcgtcgccgtaactgtaaactcacccgcttttgtgcctcgcaatgtgaccacggcatcaccgtttgcatcggtgcgggcggtttcactacttagcgtgaagttcccggtcatggaggctggcaaggtaaatttcacatcctcatccggcaacgggtgtccataaacatctttcacactggcagtcagggtaacgatatttgtattgttagcgatcgcactgcccgacccggcattcaaggtcattaccgattgttccctgtttgggaccacggtgatcgtgaccgactggtgaatatttttatccacctcaagcgaggcatcgacggaatagctaccagcttttgaactggtcaggtgcacccgcacaataccggactggtctgttgtggcggtcgtgttgtccagttgcgagccaccaggtgccacaaaattcactttcatatcttttaacgggttgttatgaaagtctgtgatgatggcggtcagagtactgccctggctgttgccagcaataatggtatctggatcggcaaccagttgtttgaattttggcgtactcgaatcgctaacgaatttcgcaattatccgttgtgaaaaaccatttggcagcgtggcgctaatcgtattttcttccgcaacctgacttaccatgtttattgtggcaacaccatatgcatccgtattttgctgcggcggttcgacaaactccgcgcttcctttttcattcttaaaggtgacctgatgatttgtcaggggattatcactctcatcagtgacgttgatcgtgagggtattaaatgtctttttatcggcgtaaacgtcattatttgtcgctgataatgtggcaacgcgagccttattctggtttgcctcaatgttataaatatgcgattgcagtggagcattccagttgtgaaggctaagttgtgcccttagtgcagtcccttgcttataggccggataattcgcggcataaacccccggctgctcttcgtgccagacaatcgtggcgccaggtttgctgttttcgacagtaacggcttttaccaattcctctttttgatatgcaaccggttgattgctatcgtctttcagttccaccctaaccttgatgtcgtctccggcataatacgatacgttatcaattgttattgatgaatggtcgcgggatgagacaacagggacgatattaacgacgatggattcttttaccgcactctcaccgttaatttgcggcgtcagtgttactgaacctgatgtcgttccggcggtcagtatctgtgtgtaactaccatcaccgttatctgtccagtcagacagggtgatatcctgaacgccttcactgcgggtttgcagcgccagccccggcaccggagttccgtcggaatcgtgcgcagtaacggtcaatgtggtcgtcgattttttatctgcagccacggttagcggattgacggataacagagaatctttctggcttaatgtcggagcctgaataactaccatgctttgttcatgccgtgacaggttaccttttacatcctcggcggtaacgtctatcgaccatgtattatcggtttctggggtgttagtgaagcggtaacctggcagcgtgaccgtgatatcttttccagacgtgctgactttacctccggcagcttccagcgcagcggcttcgatgttatagcctttaagggcatatttggtctgtagcgaggaaaccagcggttttatttctccagacttccctttcaccggatccagcagactcaggcgaatcagctctttcttgcggtattccagaacgatgttgttgttgcgatcaatcaggtcataacgactaccggccagactgcgccgtccggccacttcgtccggattaagctgtttctgcattgaactgctgggttgccaggtcagatcaacggcaaaacgtgtgtcattttcaccttgcttcccctgacgctgttccgcactgagagtcagaagcgggaagggggtatagttgaggcctgcggtaatagcatgggggttactttgacgatcattcttgtcaaacagcgccacttcatcgccatagtattgttcatagaccagttttccccccagttgtggccaggcaggtaaccagccttccgcgcgtaaatcccagccgttggccgggcgggcttcgaagtcgttatccaattctggtgcgctacgccagccggtcaggccgatataagcgttgctgctcaacttcagataatcacgccagtattctgcgccaagccctgcgcgggagtgatagcggctcaggtcgtggtcaaaaaaaaggttgatgcctgacatccagctggaggtgaaatgacgccagcccaaaccggtgttgatctgggtacgatcgtctgttcggtgaagggtatgctggctgaagagcagataatcaggtgtgtcataccacggatgcaggaagtcgaattgcgaatttttcaggctaaaatcttcatccacacccagagagattntcgcagtaccaaagttatttaaccaatcagtcatcgcgcctgaggcttctgaagacgcccaaccacgcgccatgccgctggcctgctcactattcatatcttgtgaaagcagagtgccaactcgctgcgaggtgctggctatttgattctccagcgtgttttcgccattcgcaggcggtacggcattttgttgctcatggcttttctgcgaggttgttgccggaacatccagttcttcaccctggcgcacgttatcaaagccgcgagcaaaagtacggaactgattaagacgacgaagctcctccagtgaaataccgaagcgattagcaacgctttgcgctgattccagcgcaccaagcgtgtaaggcacagtattattttctagtagaggggggggcagatgaaactgtcgtctgaggtttagcatgtaccacattttgtgccgtcgccatgacggggaaaaaaaattgtgtaaataaacaaactccggcggtcaggcggcgtattttgtcacccagaccacataaagagttttgatcattattttttatttgatgcgcatttgtcgaagccatagtgaccttccgtgaaaaaacagaattaaacttgttttttctagcacggagatataatgcgatcctgactataatatgaccagaaataatgaattagccgtggaattgctaaaccaggaataataccggcggtggctgagtacctccaaagaaaaaggatattttaattattttacgtgatgtgctgaaaagttaaattagttaaattacttaagaataattcgtatgcaatttgaatatttgcatcccgcagattaatgctgcgataaatagcgccgctgcgccgcagagtgtggcgctggcgagcgccgacgttccgttgccgagcatactggtcagcgccgggccaagaatttgcccgataccataaatgagtgtcacaaagcccaaaaggttaagatttcccggcacgctaagctggcgggcgatggtcatcaccagcgaggtcgttcccataaaggtgccgccaaaaccaatactgctgatgatgagtaataaaggagagctgctggcgagggttaacagcacgcagatcgcctgcaccagcaaattcgcggtcaggcaaggtaatgctccccaccgtttggctgcccacagccagccaaagcaacctgggacaatcgacaagccaaccagtgtccagaggtgagccgtcaacacaggctggcccgcgtctttcgccatgagcggcaggtaggtggcgacgatgatataaccaaaacccgccagaccatacagaatcgccagtaaccaccagctcatgggttgttgcgcgatttttgccaatggcgctggcgggataacgtgtttattcgacgggatgagcagcgccagagcaagcaatataatggcagaaagtgctccggcaccttgccacaacgtttgtgaagagagggcaaaatgcaggcctgccagcacatattcattacccagagcgatgccgacgccaacaccagaaaatagcgccgcaaggacaaagggatggcgagtatgttgcatgatgagtgttgagccgaaaatcaacatcccggcgctggcgactcccgccagaaagcgaatgatgaaaaccagaagaaacggcggcagccacgccatcgcgaggattaataatccggttgcgagggcggaagctaacaggaacgggcgcaggcgtgagggtaaatgaaacgcgccgaatgaaaacagcaggctccccgccagatacccggcatagttaccactggcgatccatgagagttcgctaaatgaaaactcgccttccgccagcatgactggcagcatcggcgtatagagaaagcggcctaaacccatacctaaggtcagaaccagcatcccgaataacgcggtgctgaaagaaaaacgttctacgggatgcgatgtcgaattcatgttctgcctggtttgtattattttgagttaacaagttaataacaaaaaaggagaacctgccagactgttatcgtgattttgtcgacgtaaagcgataaaaaagattcggttcgccaacgatatagatgttgccgctatcatccatcgctatcccttccgcctgcttgatgttgtgtgaaaggccatacttacctttggttaacgacatttcgccgatcacgtcacctctcacggtcacttcctgcagggcgcgtgactcatgtgacaacaccagcaacgtatttttctgtgggttaaattccgcgccagaaacatcgtctaaagtaaactgacgctgcaacgttttatctttgctgatatgcaactcatcgctacgcaatagcccggttactttgtagacctctatcggatttttctctttaaaaaaccagaaggtatggtcctgagaggagtaagccagcccttcaaagccacagttagttggtgtttcctgcaatgggattttaatttttttgaggatgctcacttccgagtcagcgttaagtgaaatcacataaatggcgtagtcacgttcatcactgatgacaaatttattatcaccaatgtattcaatcgtctcgagatccttaacaaaatcgagcggaatggtgcggatcaagtcgccctcggtcgtcatttcaacgatggttgcaggtttgttgatagtgctaaataaggtattgctctgcgctgaccaggtcagtgaggagatatttttagttactcctgtaatctctttaccatcgatagtggcctgataattctgaaaccctgcgacatgctggcttttacggacgcaggattgcacaaaaaacaggcttgccgccacgatggcgcaaagaaaaacgataaaggtgatgcgctttttcaacttattgctccttattattgcttttttctcgtcaaattcagtgcgacagataaggagtatacggatgaagcttaatgaattcttaacgcgggcgatgaaatagtaaacgccgcagggggcggcggttgtctctggatggcagaacattttcagcttacatcgactgataaatgcgcctcatctatgaatgatagatgaggcggttaacgtttaaatgttaatctatatcgtctgccatacccactctgtttgggtgattaatgaactattcttcaactatatatgttggctgataagacgttaaacccggaatggaaaatctcctattcacttctttctttaaacgggcttgattaaaactgttactgtcctgttgctcggtactgttcttggcttgtttatcggtactgtcattgacctgtttatcgatattgtcattggcttgtttatcggtactgtcattggcctgtttatcggtactgtcaatggattgtttctcggtactgtcaatggattgtttctcggtactgttattggcttgattcacgatattatcattgttcagatatgctccctcaagatagacatttttcgctctgacattgtaaaaacaggtatttttnnaaagcgtttttataaatattgtattgtcaaaccatgcgtagtcaaataggatattcgaacaatttgcaccagtacaattagtattgtagaattttgcattcgaaaagtttgcattagagattttacaatttgttaaattagcgtttgaaaagttggtatacatgcagataataccagtaagattatattctgaaagatcttttcccgatagatcggaataatttagtattgcgccagtaagaattactttaggtgttcccggtatttgaggtnttccaggtattccaggtattttagatgtttcatatagaatcacggttgtgaaatctatgtgttcaagatacgcgttactaaggtcacttccagtaaaggttacgccagtgagaacttttccgttgaagttactgtttcgtagatttgcgtttttgaaatttacataagtcaagtggcgaactttacgaaaatcattattttctaatgaggcattttcgaattctgcattacgcagatcacaatcggtaaaatccacgccttcacagatcgtaccggagaacttggcatttctaagaatgctgccattaaaattgacattccttagcgccattttcgacaagtctatgtcggttaaatccatctctgctaaattcaacccttcgatacaccgttgacccgttgcatcttcaggaatagcagtgctaatagtattgatgacaacatcacctatcttgacggtcattgtaattcctgcatcagagatagagagttttcgcgtaagacgttcactcttatctccagtgatactcttctgagcaacgtaaaagcgctcgcatgtctcacaaaatcttttccagctctcatttggggtcagattattgtccgggaggaaattagcaatgctataaagatcgttcaggacgctacttcttatttcaggagaggcgcattcaataatttcagaggtggatattgtatttttaattttatctatattatccgtgagatttcgtgatcctgctatatttggctgctggtggttttctttgtagtattgcagcaaattttcccattgtaagtttgtaaacgagaaagtttcagtcttgttattgttatcccgtatggttaattgattttctactgggtcaaaagaaatcatgaagttattcaggtgttgatattgatgagtggcatctaatttcacttcaaatgaatttgaacttttgcaggcatgttttaaaaacttttcacagggaaggtgttgatctttatctacttgttgtgggtcattgtgcaaaacagagaaaatactctctttcaaattgttcttgtcaatatagattggtagttgcgctttttgttccattattttaataaactgctgcagttgctcggttttaacattgcagtgatgacttatatctttatctttatctttatctttatatttaacagttaatacgctttcattatcatcttgtcgattaaatattatttttagatcgccatcgtcaaactcatgtaaaccatttcttttggttctgccgatgatttgttctgttgttgatgaatatctatttaaggttaattcaagattgtcgggattagagataaggtgaataaaaagattcagtacacgcttaatcaaaccatcattcaaatgatttatatcataattaatttgtttttgtatggtttcaatttccgtgttaatatcaaatggtaggttgtttttttcatggcaagcttttagtcccgaatacatgccgagtgttgggaaaatatctttgtatatgttaaatagggagcccatatttttatccttgaactgtgaaatattcttctaaatctaaaataatcagggggtggggaaagataagctttgcacagaaacttatcttttaacattacaacacccggtaatcattttatttctctatgcatgattatgggtttaagtataattcaatgtatattgtattttagacgcgcaataggaaggtgctatcaaaaatcgctcattttgtggatgggaaatatttcacggcaggcgagatatttactacaacttccttcatgcaggattatgcgcagccaattatccggttggtatatttaaagatcctattgcctggttgacgcttctgcatcgtaatgcaccacgcactgccagtcgctgccctgctggcaatatatcgcttcggtttgcccagggatcacccattgtatttcctcgccggggggacaggtcagccaaatgcataacccgcagccgccgcgtanatcacggggaatatcgctgacgcgaaaagtcatgcccgctgcctgcaacgccttgcgggtttgtatgacgccgaccgtggagtgaaataaaaataaaaactctttcatcggcgtgtcctcactcgttgaccaattaccgccgcgccaattgngccagcaaattgcgcatcaggatgggtatttaccggcattcgcaggtgagattccagcatccgggcaaacgtctagcaatgactaacgccaccagtaaacagaatcggcgcttcacaggagagacgagcaatgaaattggcactccgccgcgccatcgcgttaatcactccggcgagaatcgcttctggcgcgacgcccgctgagcgcaggctgatcacttctgattcagcaaacactgtgcacatactcgtgatggcgtgcggcgtgacattttcggtaatgcagtcgagttgctcgacgctggtgccaagcgtgcgcgagatcacctccaggaaacgcccggtgcccgccgcgcatttgtcattcatcaggaaatcgcacaggttaccgtcatcatcaagctgaatcactttgctgtcctgaccaccgatgtcgattaccgcgcnngttgctggcgcaagaaaccgtgcgcccagcccgtgacaggagatttccgtcacttgtttatcggcaaaatccaccagttgccgcccgtagccggtgagcgtcagaaacggcgttgtctctaacccttcgcgcagagtttcccaggcttcagtaattgctgttgccggtcgaaagggtgttggaacgaggaaacggcgcgtaatcacgccgtctgcgagtaagatccctttggtggcggtagaaccagaatcaatgccaatcgaatatgtcactgctactccttacagcatctcaataaaggccncgacacgggtactgagctgcccaacatccgaggtggagtagtctgtttcaatagcgatataaggaatgttgtgctgctgacgcacatgacgtttaattgccagcgattccaccgcgtaggtatggcacgcctgcaaaatcacatcaactacgccatcgacctgatattcttccaccatctggctgagcattttcaggcgctgatcgttcggcgaaacacaggagcagccaatcgccagatatttatccgccagcgcgtcgtagacatcgcccgtttctgccacgcattgctcggtcgctttcgccccggtgcagttttcataaccgacaacccagccgccattctcttcaatcgcgcgcaccactttctctgctgcgccgccaatcgggcagccgnnnnntaaaatgcgcggacgcgggtccagtcgctggccttcttcccactgctgacgaatgcgggcggtcatcgcgtccagttcattgatcaacgcctctttatcgaaccggaaggttgcgccgtaaaccactttcagaatgtcgctgccgctaagcgccggaggattgaactgcccaagatgataaaaattggccagtgcgcgacgttcgcggtttttcagcgcaatggcatcgcgcagagcatcttcgctaatttcgtgcccaaaacgttcttccaccgctttttgtaagcgcagcatctcggctttccataacgcacgcgaggcatcgtctttaacgctgtttggcagctgcatcacatgaacgggcttaaactccgccatgtattcatacattttctttttgccgtcgcaggtggtttcaccgaccaccagatccgaaaagtagaagtaggggcatttatcggttttgccgaagccgtagctacttttaatcagcgggcagaggttgcgcggcagatctttctccgcttcttcaatggtttcatcagaggtggaacagagcgaaaccacaaccgcaccggctgccatcgggatctcttgcggcataaaggtgcagtaagtgccaaccagcggaatgccgcgctccttgagatccatgacggtgagaaagcctttctggcgagcttcagagaactgatcgaaaatggcgggtagatcggtgacaagtgacatgattttccttccccgtaccacgggagataatgaaaagaggccacattattaccattcttttagtatggtttattttgatctctctcgcggttagccacttagtttttcatggatttctaaaaattgccgagggggaacaaggccgggagctgtgacagcaaatataaaattagcccaatacaaccgccaaccagcgtaccgttgacacggataaactgcagatctttgccgatatttaactctatttgccgcgacatatcccgggcatcccagctttttaccgtatcgctgatatggcgcgtcaggaatgcagaaaactcaggcgcgacgcggtgcgcggcttgttccaggtgaccatttaacgacgcccgcaaggcatcatcggcaattaacgtttcgccaaaccattgacctgcccgcgcgatacgttctttcacacgagaatcttcactgttgatatccgctttcagccattcccgtaaatccccccacaattcactgaganaggcttcatcctctttcagatagctttttacggcatcagctcgcgctgtcatttcaggatcgtttttcaacttgtcgatcagggcaaaagtggcgcgatcaaatgcatggcggatctgatgcgcacgatcgcggctgatatcatcaagcaaagaattcaccgcgtcagaaaccaactccgcgctatgttcgcccagccattcggtggggagaattttggctttcagtggatgctcactctccagccagcgaacaatctgctgggcgataaacttgcgcgatttatcgcgctggagaagggcgatcaactgtgcgatcagcgtatccagcagcacctgatgacgatcgtttttggtcatactctccagcatcaacgcactggtgccggaaagatcgaccttatcaatcgcccgatggaccgcgcgcttaagcaggcgctgaatacgtgcatcatcggtcagttcaagaaaaccactcatgatctgcaacagatgctgaccaacgcggcgggcgttttctggctggctaaaccagttgccaatcagcaacgccggttcgtgacgtcgaatcaatgccaccagcgattgggtatcgagaaatttttcctgcacgaactgaccgagattttcgccaatccggtctttattacgcgggataatcgccgtatgacgagaaatgatcggaatcggcacgcggcgaaacagcgccaccaccgcaaaccagtccgccagcgcgccgaccatcgccgcttcagcaatcgccttcacgccgctcacccaaaaattgggcggcaaaaacagcgtaacgacaaaggtagcagcggcgataagcagtaaagagagcgccaacattttggcgcgtctgagttcaatgagtttattcataacgttaagaatagagcctgacggcaggatcgcgcaaaaatcactgctcctctgccagctcggcagcctgatgttggcgcacgcgattaagcaatccggccagggtgaaaacgacgataacgcccgccacaacggctaacagatgaaacggcaagcgaccgccgttaaaccacagccagcggccaatttcgaccgagacagacatcaccatcaggatcaccatattcagcgatgcggagacggtccctttcggtaagttattggaaaacagcgtaaagcggaataaggtcgggaagatcaaaccaatcccgaaagcatacagactggtgcccagcaccgaccacagccagacgtgcggtgacagcagattgccgataatcaacagcgcgaggccgaccagttgaatgggtacggcacgccagataaagcgcggttcggtcggatctttaacgaaacgcgccacgatggcattcgcgacaatcaccgcgccgaacaccggaacctgtgtccaggcgaactgcgaggtcgttaagccgcctgcgtcaatcaggatcaccggcgagacagccacccaactcatcatggggatatagcttaaagagatggttgctgcgccaaagaggaacagccgattgcaaaagacattacgaaaatcgcgcaagacgcttttggcgctaaatggaaccgcgccgcgcttcaccgtctctggcatcgccagcagtaagccaacaaatgagataaaacccataaccgcaatgatggcaaaaaggactttccagtgcacaaagtgcatcagagctgcgccggaaagcgggccgataatcggcgcaatcagtacgatggaggtgataatcgccatcaacttgatcccttttgtctggccgaacgcctcctgcaccgtgacataaccaacggtggcaataaaacagatactggtgccctgaattgcacgcgcgataagaaactgtgtcatagacgttgtgaacattgtcgcagcgcaggcaagggtaaatattagcgccccggtaatcagcactggcttgcggccaatcctgtcggaaagcgnccccagcagccactgcaacgccatgcctccagcgagatagagactgacggcagccggagccagactgacatcggcattaaaatcacggaccacattaatgatcccaggctggatcaggtccgtcgaaagataggcggcaaagtcatacaaaatcaacgccatcgggaaaaacagcgtggcggcatggcgggcaaaaaaacgtggcataacaaacaactccttgtccggagaaccccaacggggaaaacgaaattcaataccgtcggtaatgacgaaaggtaggcgagaaggacaaatgtactgaatttcatgtaatcaaccacactgcctgtgaacacacagacagagaaataccttctgacttcgggtcagaatgtataacgattacaaatagtcatcagcacattacacctcttgaattgatgggttgcatagaaaatatacaccttaagtgtaattaaaatttgcgattaatcaaaagagcgcggtggaagggggaatatctgccgggtacaggacatgtaaaacgcgagtcagtttccggaaaaatgtatcgtttgcagacgaacaaaaatagcctggaaagcgcctcgggaaacgagaaattgccgggtgagaatggttttgttagtcgctaaagtcgggccatcttatcaacaggtgacggatcgccatgacaaacttcacgaccagcacgccgcatgacgcattatttaaatcttttctcatgcaccctgacaccgcncgggattttatggagatccacttacccaaagatttacgtgaactgtgcgatctcgacagcttaaaactggaatccgccagctttgtcgatgaaaaattgcgggcgctacactccgatattctgtggtcggtaaagacccgggaaggcgatggctatatctatgtggtgattgaacatcagagccgtgaggatattcatatggcctttcgcctgatgcgctattccatggcagtgatgcagcgccatatagagcatgataaacgccggccactaccgctggtcatcccgatgctgttttatcacggtagccgtagtccttatccctggtctttgtgctggttggacgaatttgccgacccgactactgcacggaagctttataacgccgcgttcccgctggtggatatcactgtcgtgccggacgacgagattgtgcagcaccgcagagtcgccctgttggagttgatccaaaagcatattcgccagcgcgatctgatggggcttatcgatcaactggtagtattactggttacagagtgtgctaatgacagccagataactgcgctgttaaattacattttactgactggcgatgaagagcgttttaatgagtttatcagtgaactaaccagtcgaatgcctcaacacagagagcgaataatgacgattgcagagcgnntnnnnnnnnnnnnnngcagagcgaattcataatgatggatggctgttgggaagggaagaaggggaacagcgcattcttcgattgttgttgcagaatggggcagatcctgaatggatacagaagattaccggactttcggcagagcaaatgcaggcattaaggcagcccttgcctgagcgtgagcgctattcatggctcaagagctaaccagagacggatgacaaacgcaaagcagcctgatgtgctacgcttatcaggtctacaaagcccattcaatatattgaactttaaagattttgtagacctggtaaggcgttcacatggcatccggcatgaacaaagcgcactttacctaagccatgccggaacgtggctatgatcctgcaaagataaaacgagtcacaggcgattcgtgagaataaatcaggtgcttcgccactaattctaatttattccattgcccgatacacggcctcgccaatttgcttcagcgcttcgcgataagtttcgctgagtggcaaagcacagttgatgcgcaggcagttacggtatttgccggaagctgagaaaatcgagcctgccgccacctggattttcatgcggcacagctgccgcgngacgcagaccatatcgacctgttcaggcaattctatccacagtaaaaatccgcctttcgggcgcgtaatacagatttcgcagggaaaatattcccgtatccagcaggtataaagcgccaaattgcgctgatagatctgccgcatccgccggatatggcgatgatagtgaccttccagcacaaacgttgccgccgccatttgcgtggacggcacattaaagctgctgatggcgtatttcatatgcatcagtttatcgtgataacgccccggtgcgacccaacccacgcgcaggcctggagcaatacttttactgaacgagctgcacaacagcactcgcccgtcgatatcccaggaatgaatggtccgcgggcgcggatactccgttgccagttcgccgtagacatcatcttcaaaaatcacaatatcatgacgctgagcgagagagagaacggcccgtttgcgcgcgtccggcataataaatcccagcggattattacagtttggcaccagaatgatgcctttaatcggccactgttccagcgccagttccagcgcttcaacgctgatgcctgtttctggatcggttgggatttcaatcactttcacgcccatgccgcgcagcatctgcattgaaccgtaataacagggggattcgaccgcgacaatatcgcccggtttacacaccgccattaacgctagcgacatcgagttatggcagccgctggtgatgatgatgtcatcggcagtgaccaccgagccgctgtcgagcatcaggcgggcaacctgctcgcgcaatacccgctgaccggctagcaagtcataaccgagaacggtttgcagattatgctgcaccacccggcttagctcccgccacagcggtttcaggctgggcgtttcgacatccggcgtgcttttgcttaacggaacaatggaactgtcgctatgcgccaccagcatatccagcacctgatcccactgggtaatttccactgggcgctgcaccggacgcgtcatcggcggcactggcggctgggctttacgttgtgcgacaaaataacccgaacgcggctgcggagtgatgagcttcatcgtctccagcgtctggtacgcctgctgcacggtgctgatgctgacgccgtgctcctgacttaagctgcgcaccgacggcaatttctccccgtgacgatacagcccttgctcaatccgctcggcaagtagagtcgccagatgttgataacgcgtcatgctgtattccttatttggaccatacagaaagaaaaaccggtacagatgaggctaaaaaaccggatgcagatgctgttttaacctgtctgtatgttaaacaaaactaatatttgcatctgtattgtgaactgccagaagacggatgatgaagcctctgaaatatgaggaggcagcagatggaatttcacgaaaacaaagccaaaacgccgtttatcagacttgtgcaactctggcaggcagtgaggcgttggcggcggcaaatgcaggcccgacgggtgttacagcagatgagtgatgaacggttgagggatattgggttacgcagggaggatgtggagtgaggggtatgttcgtcgcggataaacaggatttctctataacctccataaggaagtggttattattgcgaaatcatcgtttcacggaaagacgtcagaatgaaagctacagaagctcgcctactcgattttttaaaacgttcgcagcagtttgttattcccatttatcaacggacttattcatggacagaacaacaatgtcggcaactttgggacgacatcattcgtgcaggaaagcgtgacgatatatcagcgcattttatcggttcggttgtttatatagagcagggattgtatcaggtttctggtatttctccgttgctggtcattgatggtcagcagcggctgacgaccgcaatgttgctgattgaggctttatcgcgccatcttggcgaagacgaagtttttgatggcttttcggcaatgaaattgcgtaattattatttgctcaatccttatgagtccggcgagaaaggttttaaattactgctgaccgagactgataaagacagtttactggcgttaataaaacaaagaccaatgccagaaaactattcccatcgaataatggaaaactttactttctttgatgaacaaattgccaaactcggtgatgacttgatccccttatgtcgtgggttagcaaagttattaattgtcgatgtggcgcttaatcgtggtcaggataatccgcaactgatttttgaaagtatgaactccaccggtaaggcgttaagtcaggccgatctggtgcgcaattttattctgatgggcctcgaaccagagcatcaaacccggttgtatgaagatcactggcgtccaatggaagtcgcttttggtcagcaaggttacagcgaatattttgacagttttatgcgtcattatctgacggtaaaaacggggagatccctcggacagatgaagtctatgaggcatttaaactccatgcccgcagccagagtgttgctgaaaaaggcgtagatcggctggttgaagatattcatatctacgcggagtattactgtgcaatggcattgggaaaagaaagtgacaaatcgcttgctacggcttttcaggatttgcgctagttaaaggttgatgtggcgtatcctttcttactggcgctttatcatgactataaaaatgacgatttgtctcacgaagatttcctgagcataattcgtttaattgaatcttatgttttccgccgtgcagtatgtgcgattccgacaaattctcttaacaagacgtttgctactttttataaggtcattaataaagaaaaatatctggaaagtattcaggtacattttttgaatctaccttcatatcgtcgtttccccaacgatgatgaatttaaacgggaattaaaagttcgcgatctctataacttccgtagtcgtagctactggttacgacgactggaaaacgataaacgcagagagcgcgtggaagagtttacgattgaacatattatgccgcagaacgaaaatttgtcggctaaatggcgcgaagagctgggaagtgactggcagcgtattcataaagaactgttgcatacgttggggaatctcactttaacgcgctataactcccgttacagtgacagacctttcgcagaaaaacgcgatattgaagacggctttaagcatagcccgctctatttgaatatcagtcttggacagtgcgaaaaatgggatgaagctgccattcacgcccgagccgatcgtctgtcggagcttgcggttcaggtctggcaagcgccttctcttcctgaagaggttttagctgtttatcggggacagcctgagaacaaaaccagttacagcctgagtgattatccttttcttgctgatggttcgcatagccgggtgttattcgatcatcttcgcgatgaaattatgcgcctggacgcagggatcacgcaggaagtattgaagctctatattgcgtttaaagcggaaacgaattttgttgatgttgtgccgcaaaaaagccgactgcgattgtcgcttaatatgcagtttcatgaactggtcgatccgaaaggtattgccaaagatgtgacaaatgttgggcgatggggcaatggtgatgtggaaattggtttcagtgacctcgcacaacttccttacattatggggttaattcgtcaggcatttgaaaaacagatggagagcgcgttggtataacgcagcgaaaaatgcccggtagtcctggcgctaccgggtcaatgtatcaggcaactttctgtttacccgcaatcaccccaataaactcctgcacctgcctttgtttacgcgccgacagcttgcacacctggcgcagcgactgcatcagttcgctctcggcggcggcgggtggttgggcggtgaggacaatacagccttccatcactttgacatctaccaccgtgccggtggcaaaaccggcggcttccagccactgacctttcagggtgatggcgggaatacggctgtaatccgggtaacgactcgcataactcacggttaattgacggttatttgccggggagacttctgcttcgaacggttgtgcaatagaatgcgtatcagtcataactgctattccctataaatagtgattgtgattagcggtgcgggtgtgttggcgcacatccgcaccgcgctaaatacctggatatatcatcagtaaatatggggaaagtccagctaaaaattaatgaaaacaagatgaaaattagcgtgaaatataaattttggtgatgtgaataaagcggctatttagccgctttattggtttttcgagggcaggtaaattagtttaccgccgcgtcagtgagtgcatctgcaaggtgtagttgggtttgctgggcggattggatatgattctttaattcttcacatagtttataaaaaatatgtagtttactcattattttttttgcttctgagctaggaggaatagcaacaggacaacctctgagctgggttttattaatagaagctaaattagtggtttgcttacttgcgttagcaaaatattgtcttgagaatgggctattcatatatgtttctaaccaatatggatcaacatcttgccctatatttcgtcctttgaatacatggttttgatttgctatataccagtcatgacaccatactgtagttctcccgactgtatcccagtcgccgccttctgttatcaataaatctcccttgactacttgatatttttctttttcctcaatagggatttcaatctgtttaatttccgtaagatcaagatatccgcgttggacgtttgcaacacgtaaataaggaacttttaccaaagttctatttgataaatttcttcctttagtgataccactttgaatatcaataatatcttcaaataaacaccactcccacccttccggaagttcaaacggtttttcctcatcgctaattggcggcaacggtttttgtttttttatttttccttctttcaccagttgagctttttcctgcgcaattcgtttgagcagttcagaggctggttcatcattcggatcctgcggcacaagtttgcccattacggccagttgcagaatggtctgttttaacgcatccacgctgacttcggtggtaaatagagtgtcgaaatactcgctaatacgcgcccagttttcagccagttcctcggcggtttggctgtctgtaagcgttcccaacagggtttcaaccagttgttgatgtgcgtccagactggtcagggattgctgttccagttggtcgcagagggacattaattctttgattttgtttgcgatgcgaacttgttccaaggatggaggaactggagttattccagaaaaaaattgtttgtcattgattgctggataggcaacccctgtctgacaattttcaacataacaaacaaataccggagaacgtagataataataaatgaaattagcatccatcgccgtatatggatgaataatagcgaaggcagtactagcgatcggttcaggtagtatttcgttttcaataatagctatatttaacaaatacgggcgaacagtagagtatatgatagtcccttgctgaacaatttttctcgctcgcgatggggcatctttcgctgaaagaatagatagctcttcaataattccatattctttatttattgaaccaacatcaatgtaagtaaaatctttatctggagttttttgtccccagtcatgtccaatttcactaatacgcacccactcccatccctccggcaattcaaacggcttctcttcctcactaatttccggcagtggtttttgctttttaattttaccttgcttcaccagctctgctttttctgccgcaatacgcttcagcagctccgacgccggttcatcgttcgggtcctgcggcaccagtttaccgcgcacagccagttccagaatcagctcacgtaatttcttaatgccatataaatcaatttttccggaactgccgcgcccggcggtggaacgggtttgcaacgccgaggtccaggtttccatatgatcaacgatcagcttttccacactcattagttaacctccttgccagacagcgcagcgccaagaatatcgcgcagttgattacgcagcgtctggatctccgcctgctgttttgcatactgcgctaacagctcggccggatcatggctgacggtttccgcctgatgtgggtttttaatatccagattgaagttacgcgcaatcacgtcatcaatgctgactttccacgcctgctcattctctacgcggctggcaaaaccatcggcctcgttaccccaccagtcgatctccgcctgaaactcttcaaacttcatcggcttagttttgctgtagttttttacgcccgccggatacggatgctcatagaaccaaatctctttggttggctgacctttggtaaagaacaacaggttggttttaatgccggtataggggttaaacacaccattcggtaagcgcacgatggtatgcaggttgcactcttcggtaagtagctttttgattttggttttaacgccttcgccaaatagtgtgccatccggcaataccaccgccgcgcgaccatttttcgccagtacttccacaatcagttgcaggaacaaatccgccgtttcgcgggtttgcatctctgccggaaagttcttctcaataccgtcttcttccgtgccaccaaacggcgggttggtaacaatgacatccagttgctcatcccgggaggaaagcggtttgttcagagtgttgtcgtgacgaatttgcactggcacttcaatgccgtgtagcagcatattggtggtcgccagcaggtgcggaagctgttttttctcaacaccgtggatctgttgttgcagcgtctgatgatcggcgacgctcttcacgtatttgttctttacatgatcaaatgcgcaggcaagaaaaccgcccgtaccgcaggccgggtccataatggattcgccgagtttcggatcaacgcgatccaccataaagcgagtgacggcgcgtggagtatagaattcgcccgcattgcccgcagattgcagatctttaaggatctgttcgtaaatatcaccaaacagatggcgttcgctggcgctggtaaagtcaatttcgttcagcttattgatcacctgacgcagtagcgtaccgtttttcatatagttataggcatcgctgaacgcctgcttcaccacgtagccgcgtgggtttttatcgataggcgcagtgaggtttttcaacgccgggaacagatcatcattaacgaattccagcagggaatcaccggtaatgccctgcgcgttggcggcccaactgcgccataaataacgctgtgggatcggatattgatagttatcctgctccagttccagcgcctcttcctgggcatcgaagattttcaaaaacagcagccaggagagctgaccgagacgctgcgcatcgccatccacaccggcatctttgcgcataatatcttgtaatgatttgattactgagctgatagacatgttgtattccatgaaaaacaaggccttctgcaacatgatggttgcagaaggcgcaaaagagagttgttaagcagagcggggcggtaattggtagatttcgttttccagctcgctgagcgcctgattatacccgttacggtcgccaaatccggttttaataatctccggtaaggtgcccatgctgtcgaatggcttaagtttcagcacctgaatactttcgatctcctgtacgcccgcatcggcgtatttatccagcagattatcgagcacggcttgcgctgcttcagagtattttgtgaagtagttccgcttgcgcacgttctcggcgcgctctttgcgggttaacggcggctgaccatacactacgtggcaaagcatgtcgaacgggtcgagatctttaccgacttcttctgccagtacttcccagatgatcccctgttgctccagctcgtgaatgatcgcttctttgcgatcggcgtcctgccacttgcgggtaaagtcatccagcgaggcatattctttgagcagtgttttgcgggtgtaatctttaaaggattcggtaaccagtttaccgtcggcgtcgtaatactgaacacgctgggcaataacgcccactgctacaccgttgacgtgaaacttgcggattttcttctcgtcttcttccggaagtgggccgacatcatcggtatctttaacctggtatggtggcgcaggcggttcatcaacgcctgttacctgttcgtcgtcatgttcgctgatttcttcgagtttctcttcaaaatcagattctggatcggcgatatcctctggtgtggtatccatgactttttcgggaatgccatcgaaacgctcatcggcaaacagttcggtggcttttttaaagtcgaggatggtaaaccagagtttgccgtaacgttcgtcgatgcgtgtaccacgaccgataatctgcttgaatttggtcatcgactggatgttctgatccagtactaccagtttgcaggttttagcatccacaccggtggtcatcagctctgaagtggtcgcgataaccgggtacggttttttcgggttgatgaagttatccaactgagctttgccaatttcatcatcgccggtgattttcatgacgtatttgtcgttctttttcacctgctccgggttgagattaaccagggcgcggcgcatacgttctgcatgatcgatgtcgttacagaagacgatggttttatccatcggattggtacgcttgaggtagtcggtaatggttctggcaaccagttctgtgcgttcgtcgattaccatcgtgcgatcgaaatctttctggttatagatacgatcgtcgatcacttcgccgtttaagtcagtttgccctttggttgggcgccagccttgcagatcaacatcaatatcaacacggacaactttataaggggcgaggaagccgtcttcgatcccttcttttagtgagtagacgtaaaccggatcgccgaagtaatccgtgctggagacttcatgcgtctcttttggcgtggcggttaagccaatttgggtggcggaactaaaataatcaaggatctctcgccaggcgctgtcttcggatgcgctgccgcgatggcattcgtcgatcacgatcagatcgaagaaatctggtgcgacttgtttaaacgctttttggtcttcctccgggccagttatagcctgatagagcgcgaggtgaatttcataagcgggatcaatggtgcgtccgctgactttggtcattgccgtaccaaatggctggaaatcattatttttggtttggtcgaccagaatgttgcgatcggcaaggaacaaaatgcgttttttattttttgatttccacaggcgccagatgatctggaatgcggtataggttttccctgttccggtcgccatgaccagcagaacgcggttttgcccgttggagacggcttcaatggttttgttgattgcctgaagctggtaataacgtggcgatttaccgctgccatcgtcgtaatagtcctgagtaatcaccggaagctgagcttgtgtgtatcctttccagaggcagaatttttgccagagttcagcgggggaggggaagtcatccagcgttatttgcttttcaaggcattcaccttcggctgcggtggcatcgcggaagataaagccatcaccgttggtggcaaaaacaaaaggaacgtccagcaggcgcgcatattcaatgccctgttgcatccctttgccaatttcatgtttgttggcttttgcttcaatcacggctaagggaatgccaggtttgtgatacagcacgatgtcagcagattttaccgttctgcgtgccgcaactttaccacgtacgatgactttaccgtcccggagtttgacctcctgtctgatttgcgttgtgttgtcccagcctgcattgagaatggctggcataacgcatttggtaatgatgtctgcttccgccaggttacttaggttcagttccgccatggggtattctcgcttttatcaggacgattctgattgtacataaaatcaatagcctggctatgatttagggcggtgtttcaacgtaaagtacgtagcagagatcacattgatatctctgttatatcttgcttgaattaatctgggcatatcagagacagataaacagaagttacaggaaccatatcaactctaacaaaatatataaaaatcttatagttgcgtttctttcgagcaagaaagataatgttattgttgattgtttgattgggtatatgaaatggaagctaaagaatgtaaggtgcaggatatccttactgaaaacaaaaagtttattattccttcttatcagcgtccttacagttggacggtagataatgcagagcaactcattgatgacatttataaaagctctcaatcagaagagaatgaatattttattgggagtatgatttgtatcaataaagggcaaaatcagtatgaagttgtagatggacaacaacgtcttacaacgttaagcattattgtctccgagctaaaaaaatcatcccgattcaggggataaaagatgatttgcaaaaaagagttctgcctattgatgtttattctgatgaaacagatgaaccaagactaattgttagaaaaaaagagcatgatctttataaatattatatactgcaggattctaaagattataaacctgaaaagccatcggatactgagttagtattcattagcaacgctgaaacaattagagattatttgttgcggttatctgttgatgagttgaagttgcttgctaaatnnannnngcaaaatgtatatatcgtatttgtgcaaacagatgatttcgcatcatcatttagactctttaatgtattaaatagtcgaggtttacctttaagtaatgcagatcttttaaaaaatgcactgtttgaatcagcttctacacataataaaaaatcagagcaaatagaatcagcatggtcgcaaattgaagatatggtcggagtgagacggcttgataaatttcttactcttcataagctttccgagaaaaaagatcgtgacagggtgttacaaaaaggttttgaagcttttattgaaaatctccagcagcaatttgatggagatgctattgctatgtcactgatgttggttaattctgtaaaaaattatactaagattttagagaatgattttgaacacccttcaatacgacgaaaaatagcatcgctaagtaatttaggggtagatgagtggattcctccggttatggcattcatgaatcgaatggctcgtacagaagattttaatttagatgatttttctcaatttattaccgcctttgagaaggtatatatgcatgggtggttaaaaaaacaaattaaaagccaaagagaaatggtttgttattcagctctggtagcaataaataatgatatgccttttgattctgtgataaatcagataaaccaacatgcagataattcaggttttatagctgctctggatgaagatttatatgagcctcgtccgaatcaagtgaacttaataaaagcaattttgcttcgcttagatatggagcaacaagatgagagcgtgattaaaacctatacggggagaatcacaattgagcatattcttcctcaagcattagttaatgaatactggattaatagattccaacctcaagagcatgtctactggctgcataaaataggtaatttaacactcataagtggttccaaaaattctgaagcacaacactatgattttatcaaaaagaaatctatttatgagaaacttaatagtaaaagctcttttgatttaacaaaagatgtttgtaattcttcagaatggggattggctgaactgaaaatgagacatgaaaaaatgaaaacgcaattgaagaagctttggttggtctgacatatctaaagagttccactcgtaataatgttgcggtggaactctcaaaaagttgatctttcccgaacttacttcctcaaccccgcaaacgctgcccgaatctcttcctccggcaactgaatcccgataaaaaccattgtgctatgcggtttttcatcgccccacgggcggtcccagtcggcgctgtagaggcgctggacgccctggaacagcaggcggttaggttcgccgtcaatccacagcatccctttgtaacgcagcagtttatccgccgattccagcagcaggttttccatcacgcgggaaacttcgctgatatctaccgggtaatccagttctaccacaatcgacgaaatatcgttttgtttatccgcgataaagtggaaacgcggtttggtgctgacgacgttttcttccagcataaaaccgttggtgttgaacagcaggcccaggtcgatgtcgccgtgggtaacggtgtagaccggtgcacgggcgttgatgcgcgccaggcgttcgcgcagtttttctgcttcgcctgcgacgtcggttttggtcagcagaatacggtcggcgtagccaacctgggactgggcgatggtgaactggttcatctgctcatcggcatgtaccgcatccaccagcgcaatcacgccgtccagcaggtaacgctggcataaaatctcatgggagaaaaaggtctgaataatcgggccgggatcggccatgccggtgcattcaatgaccagacgatcgaactgaatattgcccttatcgagattatccagcaggtcgagtagtgcgtcttccagctcgttggagcgcgaacagcagatgcagccgttggtcagcgttttgatctgcgtggcgcggtcgccaatcagttgatcatcaacggagacttcgccaaattcgttttcaatcacggcaatcttgtagccgtgttgttcgttaagaatatggcgcagcagggtggttttgcccgcgcctaaaaaaccggtgagtagggtaactgcaatcgggttcatgctctctccattaacaacagcgcataccgcctttaccatcgccgccgtagcgcgcgttctggcgttcgcggaagaattcttcatagctcatgtacggcttgtcgggatggttggtcttcatatgctcgacgtagttgtcgtagtctggaatgccaatcaacatcttcgccgcctggccgagatatttttttgcctgtcctaagttaccaaacatagttcactctgataagaacaaagccccgccgaagcggggctaaacacggttagtggtgcgaagagatcttcacgccgccttccgggattggaacgtacggtgtttctttgtcagtacgtttgtcgctgttacgtaccgcaagccaggttttgaaaccgtagaagatgatgctgtacaccacaatcaggaacagaatactcaggcctgcgttggtgtagttgttcacaacgatgtggttcatgttggcaatctgctgcgccgtaaggtcagtaccgttagcaatcttctctttgtactggcttgccatgtagaagaagccttccatctgcgggttggtgctgaacagtttcagacccagcgcccaggtggtgcagataagcagccatacagccggaacaacagttacccagatgtattgggtgcgcttcatcttaatcagcacaacggtgcccagtaccagcgctacggctgccagcatctggttggagataccgaacagcggccacaggctcttaacgccgcccagcggatcgaccacgccctgatacagcaggtagccccacagacccacacagcccgcagtaccgatgataccagcaaccagagagtcggtttttttcaggaacgggatgaagttacccagcaggtcttgcagcataaagcggccagaacgggtacccgcatccagcgcggtcaggatgaacagggcttcgaacagaataccgaagtgataccagaagcccatgtcagccatcggcagcactttgtggaacacatgagcgatacctaccgccagcgtcggcgcaccacctgcacggttcaggacagaaggctcaccaatgtctttcgcggtttgcaggatctgctctggcgaaatcacgaagccccaagagctgacggtcgctgccgcgtgtgcggtaacgtctttcagctgcgccatgatgatcggcgcgttctcgccacccatttcatgcaggttaggcatggtgatgccaaggcccgcgggcggggtgttcatcgcgaagtaaagacccggttcgatgatggatgcagcaaccagcgccataatcgccacgaaggactccatcagcattgcgccgtagccgatgaaacgcgcgtcggtttcgttagccagcagtttcggcgtcgtaccggaagagatcagcgcgtggaagccagataccgcaccacaggcgatggtgatgaacaggaacgggaacagagcgcctttccacagcgggccagtaccgtcaatgtactgggtcatcgcaggcattttcagttccgggttcagcaccacgatacccagcgccaggccgacgataacgccgatcttcaggaaggttgccagatagtcgcgtggtgcgaggatcagccacaccggcagcagcgcggaaacaaacgcatagccaatcagcgcgaaggtaatggtggtgtctttaaaggtcagtgccggaccccagtacggatcgtgagcaatcacgccaccgaagtagatagaggcaaccagcagcacgataccaataacagagacttcacccacacgccccggacggataaagcgcatgtagatacccataaacagcgcaattggtacggttgagcaaacggtgaagacaccccacggactttctgccagggctttaaccacaatcagcgccaggacggcgaggatgatgatcatgattaagaaacagccaaacagcgcgatagtccccggtactggccccatctcttctttgatcatctcaccgagagatgcgccgttacggcgagaggagataaacagcaccataaagtcctgaaccgcaccggccagcactacccccgccagcagccacagcgtgccaggcaggtagcccatctgcgcggcgagaaccggtcccaccagcggaccagcaccggcgatagcggcgaagtggtgaccaaacaacacgtaacggttggtcggaacgtagttcagaccgtcgttgttaataaccgcaggcgtcgcncgcgtggggtcgagtttcatcaccttctgggcgatgtacagactgtagtagcgatacgccaccagatacaccgacacagaggcgaccacgatccacagggcgctgacgtgctccccccgacgtaatgcaactaccgcgaggcagaatgcaccgatgattccgagaatcacccagggtatgtgcttgaatagttttttcgtatccatagtaaaacctggcatgtattgattaatagttggccgaagccgttctaggtttgcgttgcgtttgaggaggtaaattgaccgctatcctgcaatgatgctgccagagttacgcgcgcgtaaagtaaggtaaataactgagtggttattttagggacgtaagcggtcagttttgcggttgagcggttttgagcaaggtttatgaaggttatttatgtgatgatgatcacaaccgaagcgatttttagccctcggttgtgtaactcatttaaaaattatattcatgctataaatattaaataacaatatagcaatatggtgtgttatttatttctttaagtaaaacgtgttttttacgagatttagtaagataaaatttctcatctaaatagcaatcgatgagagagtccagcctttccctgtctatcataggggtgatacccaaggtccagaaactgcgtaaatcgagttcggaacgttttatttttgcgcttttttctaagtctgcgatcatatttttaacacaactggtcgcgtctctgttttgttttatttcaagcgcgatatagctatcttgtgcccagccttttttacgtagtaagaaatctgtgcgtagtgtcgggcgctcaggttttttgcgcatatcacaggaaagtgcttgttcacgccaccattcatggtctgttgagcagagcatattagcaaactctacctggaaccacacttcccaaccggtgatattgttttggtcaataatattaagcttttggcaaatatcctcacgttcaaaaaagagatgtaatagcgttgagagatgatcgaagtcacggtttaacatttcagatgtcctttcttaaaattccacactctataaaatatttcgttcaaaatagatacaattcgtgtgaaaaaaataagaaaagaaaatgtatcaataagtggttattgtatttttgaacaaaaattaaaaaaagtgaggtaaaatcaaccagtttcaagtcgctacctataaagttttctcatttcaggccgaaaattttgcatcggtccacaggaaagagaaaccatgttaaaacgtatcaagatcgtgaccagcttactgctggttttggccgtttttggccttttacaactgacatcaggcggtctgttctttaatgccttaaagaatgacaaagaaaatttcactgttttacaaaccattcgccagcagcaatccacgctgaatggcagctgggtcgcgttgttgcagacgcgtaacaccctcaaccgcgcgggtatccgctacatgatggatcagaataatattggtagcggttcaaccgttgctgagctgatgcagagtgccagtatttcgttgaaacaggcggaaaaaaactgggcagattacgaagcgttgccgcgtgacccgcgtcagagcaccgccgcagcggcagagatcaaacgtaattacgatatttatcacaatgcgctggcggagctgatccaactgttaggtgcaggcaaaatcaacgagttctttgatcagccgacccagggatatcaggacggtttcgagaagcagtatgtggcttacatggagcaaaacgatcggctctatgatatcgccgtcagcgataacaatgcctcctacagccaggcgatgtggattctggtgggcgtgatgatcgtcgtactggcggtcatcttcgccgtctggttcggtattaaagcctcgctggtagcgccaatgaatcgcctgattgacagcattcgtcatattgcaggcggcgatctggtgaaaccgattgaggtggatggctctaatgagatggggcaactggcagagagtttgcgccatatgcagggagagctgatgcgtaccgtcggtgatgtgcgcaacggggccaatgccatctatagcggtgccagcgaaatcgctaccggcaataacgatctctnttcgcgcaccgagcaacaggccgcttcgctggaagagacggcagccagcatggagcaactcaccgcaacggtgaaacagaacgccgagaatgcgcgccaggccagccacctggcgttaagtgcttctgaaacggcgcaacgcggcggcaaagtggtagataacgtggtgcagactatgcgtgatatctccaccagttcgcagaaaatcgccgatattatcagcgtaattgacggcattgccttccagaccaatattctggctttgaacgcggcggttgaagcagcgcgtgcgggtgagcaaggacgtggttttgcggtggttgcgggagaagtgcgtaatctggcccagcgtagcgcccaggcggctcgtgaaattaaaagcctgattgaagantcggtggggaaagtggatgttggctctacgctggtcgaaagcgccggggaaacaatggcggagattgtcagtgctgtgacccgcgtgacggacattatgggcgaaatagcttctgcttctgatgagcagagccgtggtatcgatcaggttggcttagcggttgctgagatggaccgggtaactcaacagaacgctgcgctggtggaagagtctgccgctgccgccgccgcgttggaagagcaggccagtcgcctgaccgaagctgtggcagtgttccggattcagcaacagcagcaacagcagcgtgaaacatcggctgtggtaaaaaccgtgacgccagctacgccgcgtaaaatggcagtggcagatagcggggagaactgggaaacgttttaatcgccataaaaatgcccgataagcaaaatgttatcgggcatagggagtttaatctttacgcgggtcgttgatcggctgacgaaccaggaagatgtacgccagtgctcccgctgcggtgacgcaaccgcaaatgattagtgccagacggaatgagtgggttgtatcaacaataaaaccagtaatgatcggcgcgaaagaggcgcagatgaagctggcaaagttctggatactgcccaccgacgcagtcatgcgagaagcaactgcgacgtggatcaagccccagcaggatgttccggcaaagtgaatacagaacagtgccatgccaatcagcagaaccgccatcatggatgttgtcgcttgtggtactatcagcgtaaaggcggcagaacagaacatcccggcaataatgcagatcttacggcttttaatcggagccattccccctttgaccagccagtcagtaacgtaaccgttgaccagcatcccggcagcaccaaacaggaaagggatagccgccatcaaccctgtgctttttaaatccaggttataggctgtttgcaggtaaccaggaagccaggccagatacagccacgcagtgtagttgatgccactgaatccgagcatcattccccacattgtgcggttacggaacaggctgcgccattcggcaaaactgagcggatctcggcgggcattgacgctacctgcattgagataagcttgttcaacggcagtcagttctacgtgctcgcggttgcgatagagcatataccagccgatggcgagaaaaatccccagtacaccaatggtaataaacatcccgcgccagcccatcaccagcatcatcgccgccagaatcggtgggcttacggcaacgccaatggtagaagctgcgttgaagaagcccatcgggcgtccgcgctctttgatgttgaaccagtcgttaatgacttttacaccgcatgggttcatcggcgcttcaccaatccccataccgatacgcaccaacacgaactgcgtaaagctgtgcaccatgccagacatggcctggaacagtgaccagaagaacatccccagtcccagcatcaggcgtgggcctttacgatccaatagtgggccgcaaggaagttgcgcaatgccgtaagcgagtgaaaacacggagagcaaagcgccgatttcggtggcacttaatcccaattcttcacgaatcgttaaatttgctaccgacagcgaactgcggtcgagataattgattaccgccgcaaaaaataataacaacatggcggtggtttgaatgcgtttaattcgggtactgcgttgaactaatccatctggtggcacgggaatatctgccgacgaagatggagtaaatgaagaacgcggatcgagggtgatattttctttttccacgccggactcctgtatttataatttnaattgtttacgtaattgtgcattacgcaaggttgacattaacggcaggttaaagttttaggactttactaccgctcacaaaaacatttttagtcgactgattgtgagcataggtaagcgggaatttcccggtatttatcttttgataaaaccgtgcacccgctaatagtttgctgtttttaatccgtacttaatgagcataacgcgtgttctcattaatggatcgaatcattgattgtttcgctgaattcaaatggttacggagcgcaagggtggcatcaaggtcactgcggcaaatcagagcgctgagaatggtcatatgctcatcgacggcaatgatattgcgctgtttaagatcgctttcgtcccattgatagtgaaaatgaaagatgactgagatgatctcaagcgattgatcaaaaaagatattgtcggcagctgaaagcagtaaggagtgaaaatctctgtcaagttgcgagaacatgcgaaagctattgccgatgttgtcacgcagtagccgatgacgttcgagcatggttttcgcctgcagccagcggggatcatgatcaggcaggttgagaaagtgctgaagtgaatgtgtttcgagcatttcgcgtagctcaaacagctgctcagcgtaggattgatcgaattgcttcatgctccactggccgcgcttttcgctttgaataagattataacggccgaattttaaaagatattctcttacaaccaccgggctgacacccncggcccgagccagttgcagttcagaaaaagtttcccctgggcgtaactggcgctggtttatcatcgtgaaaaaagcctgctcaaacactttgttttgttcactcattgaagcggtagtacaggcgaaaccgtcatcatggtcaggtttacgcgcaataacatagtcgtttccaacctgcgttaagacgccgcattcgcgtaagtggctgagaatatgacgcactgtagtgcggctgatgttgtacatttccgccagcgcactttgcgatggaagtggggaagggatatgaccccgcgccatatcatcaatgacctggttaatcacattgtggcgtaaattttgtgaacgactcatattttcctccttgtgagtccattaaaacccgatttaaaacatttttatgcgtgtgttttcacaaaacagattttccgttccgctgccatttttcattttcattgatatctaaggcaacaaaaaatggagagccgaatcatgtctacgatgaatgttttaatttgccagcagccgaaagaattagtctggaaacaacgcgagatacctattccgggtgacaatgaagcattaataaaaattaagtctgtcgggatttgcggtaccgatattcatgcctggggtggaaatcaaccattttttagttatccacgggttttaggccatgaaatatgtggggagattgttgggctgggtaaaaatattgctgatcttaaaaatggtcagcaagttgctgtgatcccttatgttgcctgtcagcaatgcccggcgtgtaaaagcgggcgtaccaattgctgtgaaaaaatttcagtcattggcgtgcatcaggatggcggttttagtgagtatttgagcgtgccggtggcgaacattttgcccgcagacggtattgacccgcaggcggccgcattgattgaacctttcgctattagcgctcatgcggtgcgtcgcgcagccattgctcccggcgagcaggtgctggtggtcggggccgggccaatcggtctgggcgcggcggcaatcgctaaagccgatggcgcacaggtggtggtggcggataccagtccggcgcgccgtgaacatgtggcaacgcgtctggagttgcccgtgctggacccgtcagccgaagattttgacgcgcagctgcgggcgcagtttggtggttcgctggcgcagaaagtgatcgacgcgacaggtaatcaacatgcgatgaataacaccgtgaatctgattcgtcacggcggcacggtggtatttgtcggcctgtttaaaggtgagttgcagttctccgatccggaattccataaaaaagaaacgacgatgatgggcagccgcaacgccacgccggaagattttgctaaagtcggtcgactgatggcggaaggaaaaatcactgctggcatgatgttaacccatcgctatccgttcgccacgctggcagaaacctacgagcgcgatgtgattaacaatcgtgagttaattaaaggcgtaattactttctgaaaggcgagattattaaagttgccatgcagcgtccggggaagtgttgggcgctgttttttttgtttcttaataatgtgttgtaagccggagaaggtgtgtaggtcncacccnatgcgacctacacatcagtcaggaattacccttcacgttctaccactttaatttccaccatgccgatcccgagcttacgcggcgagtgtccgaggatattcccttcgttggttgagacaggttccggcggcacaattaccagtgtgtcggcatcggttgggttatcgaaatgcagtgtggtggtggtcacttcattgcccagcacaagagtttgttcttcattgcctacgcgtaccggaataggacggctggcgttattgccgtatgctttggcggtaatcaccaggtcaaatttcttcggcagcggatgcttgtactcgatttttacttcatcgcccagctgcgcgttggaccagcggccccacgactccggacgggaaatcccgctaaactgtttcacctcttctggcgcaccggcgacgttaaagatgaaactgtcggctttgtagcgaatatcgttatcaacaatcttcagcgtatcgacattgcctttgtaacgcgccatgtcgatgaccgtatctttaaatgccgtcttgctcttccatgttgttttgtcaacatgctgaacaatttgctgaccgccaagttgcccctgcgagacacaccagtcggtggaaagtgccagttccggagcccagagttgtgccatcttgtagcaacggtcaacccagacgaaattgtcgcgtggagcgaaatcggccagctggaaacgcagcggtgctgagtattcgctttctggcagcggttccacgcgtttgtctgaaacccgcaacagcagcggcaaacggaaatggctacccgagaaggcaatcatgtttttctgctggtcgatggtgaactctttcatctctttagggaatttccacagacggatgatatccggcttccacgccaatgttttctctttgatattgaggaagatttccgacattgactgcccggataaactgctacgaccaagtccgagatagttatcgccaccgagaatgtccagcaccgtcgctccgttatccatcgtgttacgcttcactgccagcgtctcttgctgcggcttgtcgccacgaatgacaaaaaacaggttattgcgatcctgcttattgaggtatttccacgccgtgttgttcatcgctaaatggtcagaagagacgacgatgacagtatctttaaaccacggtgacgctttgattttgttgataaacgtcgcgatattctcctggctgcaacttaccgcgctgaatgactgattcggtttaccgtcaaaatcatattttttgcggttacaggtacgagagataaaaccatccgggtgatgggtatcgactgtcagggtaaacagtgagaatcgctgacctgagcgggaaagctcttcaaactttttccacgcttcatcgagaacggtatcgtcgtagaatccccagtcgttgcgatagtgcgggtcggctaccacgcttttcagctcttctgagccgtataagtggtcgaagccatgcgacttcaggaacacatctttaccggcaaaacgcagattcgcgccctgcacgaaatagttctgataacccgagtttttcaggatatcgcccagacagatgttctgcgggaagaagctggaaacagaagcggaggcgttgccttcaaagggggcaaacagcggtatgccgcactgagaagccaccatgcccgcaatcgtgtaatctgttcccggcagctgctgcgtgtggctgaaatccaggccttcatttttcaacgcgcccagttcaggcgtgaggtccgggaaagcctcgttatcaaaataggtccgctcgagactttcgccgtagatataaaccaggttgagtttcgggtcagggatagttttcgacggctctttataataagccgcaaagtccgggtcgccgtcgcgtgactgggatttcaccagttccgttatctgacgaaatgccgggctggcgtccaccgaacccagcgccagtaagagcgccagcaggctgtaaccaaaatggtgcggatgatggcgacgacggcgcaggatccagcccagcgcaccgaacaccgctgtcagccccagcacaatgccgatacccggcaaaatgtatttgctgacgccagcaccggtcaggctgttggttaaggtatagagaaccgcgtcgttaataccatcgccagtaaaatagtcgctggcaaacagggtgatatttaaaacgacaaatagccccagcaccgttaatgtggctgcaaaccaccaggtgttacgtcccgctttccatgcgtaaatcagcacagaggcgagaaaaagggcgaaagagagtagttctgacaacgggcgatcctcactaaaccgggccgtttagccaacgtttaagctttttgagaagcacaatgtaatggcgtcgccatattgctgcaattctagtgtcaaaaaaatgcgatgttgttaggaattagtttataaacagacttttttgatcgcggtcgcttcccgtgtaacagggggaaaaccgtccaggagcagggaaaagggcaggagagagccgcgtcagccgggtaacagctaaaacgcggcgtttcgcggttcaggaaatgaagttcagcccctgctttaacaccagatcgcaggctttggttttcaccttttctgccagcggagttgttccgatgttatccagattgagttgctgaccatctttggttttcagcaaaccctgaatgccgtccagatagttggtgtcttctttttgctcttcactgttcaggcccagcttttccagcacctggttcttgatgttttcgacatcggttaccgaagccagcttttgcttcgcgcagtattgcagaatgcctgcggcattgttcatgttatctgcgcttaaggcctggtttccgctgctaagcaagttagttaatgacgcgagcgaccaaccgccttcctgtgtcgtgctgttttggttgccaagttcgctggcggcgctggagagcgcatctttccaggacgcagcatgcaccccggtggaaattaatgcgctggcggcaatggcacagcacagaagatgtttaacagttttcatcatcattactcaaggtggaattgtgtcgcagtataccgccagaaacggggattaatactctttacctgttacacggctacggtagctatcccagttgaagatcacccacaaactgttacccaggcgcatacggtccatcacgcgttcgcccagcaacttggtcatctcttccatattactgttggtcagcatcccggttgggcgtttggaagaagagcggcgatcgacgatctggttgatgatcactttttcgtatttcgattcggtctgcacgccgatctcatcgatcaccagcagatcaacgttgctcagatcgttaagcagttgttcttcgctggtaccgctattcctgaaggtatctttcatcgccgacataatatcggccacggtgatgatcaatacggatttaccgcgtagcagcagctcgttgcagattgccgccgccagatggtttttgccggttcctggcttaccagaaaagatgaagctggcgatgttgccgtcaaactcttcgacatactggcgcgctttgcttaacgcattcatctgcccttcacactcaacgcgatagttctcaaaggagcagttctgatgcagtggacgaataccggagcggttaaaggtgcgctgcattttcatcgcccgattttcacgttcgagagcggcggagcggatcgccccttgttctttctgccaggccagtagctcttcacccgttttgaatgcaggtttgatatgggcaggcatcattttttgcaggcgttgcatcaggtcgccaacgtttttcatcgttaccctctgaatcctggtggaatttggctgtcaggttcactgaccgtattcacatctcgtttcggcagtccgccgttgctggcacgaccgatttgcaggctgcgcgccagtttttgttgccactgcacatggtgaaagactttaccttccgcctgccagtaggcaatgaatgaggccagttcttcggtggttaccggctctcttagcgccacgccccatagagccgccaggcggataaagtcggcatcgggttgccagtccggatacatggcgaatttccccatgggtacagcaacgggagcggcttgcggttcctgatagagttgatcgtccagatcgacatcgcttcccggacgcgccagcttttcttccagcgccagcagttcagccaggcgtgcaggcgtgacggcataaaacgccggggcattgttagcaaatacggcaaccacaccgccttcagcttttgccagaacggtttggtgatcgtgtaccagggcgtcaataccaacgacgtccggggtcaaaactctggaagacatactgtttctcaaatatggaacgatgaacgagaagggagataacttttatagtaacacacggaggagaggaggctgtctctcatccgtgtgcttaagcgaggcaattttatacgcgagggcgcttgcggtacaaccataatccaggaatggaaagaccgatggataacgcaccaacaatcgatgaagctgtaagaaagttggttaacagggtaatcatcaacggttcgctgtaacctaactggctgatttttaccgccgaaatcattgcggtataagccgatatgcccgggaacatagggataacggccgccacggtaaacactttcggatgcgccagataccagcgcgaccattgaataccaatggtgccgaccagcatggaggccataaaggttgaccactcaatattcaacccgctggtcatcaagatcattcgggaaccatgacctatcgagccaagcagcgcacaccagcgtaacgcccgcacgggaacgttgaacaccatcgcaaagccgaccgcaggaatggcggcgaggatcatatcctgcgccaacgctaacagaaattcgatcacacccatccgcgtagcccccaaatcgtcagtgccatcactacgccgacgcaggtagccagtgtcagcagactggcgatcgcccagcgtgccagtccggtattgatgtggcctttaaacatatcggcgacggcattaatcaacggaaagcccggcactagcagcagaacgctggcggccatcgcaatggtgggggtattgctgaaagtggggagttgcaaaagcaatccggaaatggtggtggcggcgaaagcggtaaggcaaaagttgatctgtggatgaagatgacgttgtgccagcagctggcggatatacatcgcggtcgtactggcaaagaaggtgatgacggcgccatcccagccaccgttattgagtttacagaaacaggcgcaagaaaggccaaccattaaggctaccagccatcttgggtaacgtaatggctgaatttggctaaatcgtttctctacgcctttgtaatccagcagatgatgctccgcaagaatcacaatgtgctggacttcagtcaccacatgcatattaatgccgcgatcgtgatttttacgtgtcgatgtcaggcattgcccatctttaatagttgtcagcactatggcgttcgaagagatagaactttcgacgctgtccattcccagcgcccgacccagtcgtgaggaaagctcatcaaccaacgcgctttccgcaccatgttgcaaaagaaataatccacactggatacaaagccgtgttacggctcgctgttgctcagtttgcataactcgccctttgtcatagacgtgctgcgtattgttcagataatgagaatccatttgtatcatgaagcaaggttgttttgcggtaggttaagatcaaaattgcgctgattaatcctggttatcgggacaagctcggtgataaaaagcgaattatctctcgccgcaaacaaactatcacatgaatattatcactataatgaatttattgttttagcctttacgggtcaggataatagatagctgggcgcgttttttagtgttaacaagttaaaatcatcagattttattgaataaatattgattgtgtgattcccgcattctgcgggaagagatatcatttaattataaattaaatgaatgagatttctgtttttcattaagtatttctaacaacttaatgtagatattttaaatgtctccaggctatttcaccaggttatcatttgatgctaaccttctgacacatgcagtggagttgttgtgcagcaggagtatgctgatatgaaagtgaatgctaaggataatttattcgcttaatctattaatttgctggaaacatttaaggaatgaatatcctgaataaaccatcataatttttagacagtggatgtggaggaaatatgttgccaggatgctgcaaaaatggaatttttatcagtaaaataccggttatgcaagcagggttaaaagaggtcatgaggactcacttccctgaatatgaaataatatccagcgcctctgcggaggaccttaccttattacaattacgtcgttccggattagtcattgctgatttagccggtgaaagtgaagatccacgttctgtttgtgaacattattattctttaatctcacaatatcgggaaattcactgggttttcatggtgtcacgctcttggtattcccaggctgtagaactgctcatgtgccctacggcgacgttattgtctgatgttgaacccattgagaatctggtcaagaccgtacgttccggcaatacgcacgcagagcgtatcagcgccatgctgacctctccggcaatgactgaaactcatgattttagctatcgctccgtcattctcactctttcagagcgcaaggtactgcggctattaggtaaaggatggggcatcaaccagatagcttcattgcttaagaaaagtaataaaactatcagcgcccaaaaaaacagtgcgatgcgtcgactggcaattcacagcaacgctgaaatgtatgcatggataaatagcgcgcagggtgcaagagaacttaacttgccttctgtttatggagatgccgcagaatggaacacagccgaattaagaagagaaatgtcgcactcatagaaaaatgcgtcatgagtagtatcggtattgagagtttattcagaaagtttgcgggcaacccttataagctccatacctataccagtcaggagtcatttcaggatgccatgtcgcggatctcgtttgcggcggtcattttttctttttctgccatgagaagtgagcgcagagagggattatcttgcctgactgaactggcgattaagtttccgcgtacccggcgtttagttattgcggatgatgatattgaagctcggctgattggttcattgtcgccatcaccgctggacggtgtattaagtaaagcgtcaacgctggagatttttcatcaggaactctttttgtcattaaatggtgtacgtcaggcgaccgaccgactgaacaatcagtggtacattaaccaaagccggacgttaagcccgacggagagagaaatattgcgctttatgtcgcgtggctactcaatgacacaaattgccgagcagcttaaacgcaatatcaaaacgatccgtgcacataaatttaatgtgatgtcgaaactgggcgtcagttctgacgcagggttgttggaggccgcagatattctgttatgtatgcggcattgcgaaacaagtaatgtgttgcatccctattaatccgcatgatgccgggtttacttccccggcagtgctttcatttcagcgtacaatcgccacattgctgtacatccggtaagcgataacgctggcagcaagtgcggcgcaccagcaggccgtcgcgtagcaccacggtacgccagagtggattatcttcaccggtagtaagcgttttctcaaaaaagagggcatggcgcagcgattcaaccgtcgcctcgccgagcagttgcttcatctcagtaagataccagttgatcaaataaccggtattactccagataagtttgccgttgatctctccggtcgcttctagtgcctgcacaaccggaaccagcgcctggctgattaacgtttccattcgctgctgcggcgaatgtggtgttgcgtttttatcttcacacacatcgacccagaaacaggcgacgcgtccggtttcgtgaaactcagcatggaaatgttccggcgacacatctaatgctttttcctgcgtcagtagcgccagcattaatggtggcaccatcaggccgatataccattgtgcccatagtgagatcagcggtttgtactcgcggatcatcgttggttggttgcgatagatatgatcggaatagaccgccagtagagaacttagcgcattcggtgatgaccattgcgccagcgtcatggcgttaagcggagcgggttcatccaggcggataaactccagcaaatgttcacgatgttcggcgatcgtcgcacgtacggcttgtgcaagcctagcatcctgtggctggagatgcgttcgccagatgatatcttcatagagcggtgcggaacgataggccataatcgggatagtaatctaaatgataatgattgctaatcctagcgataggtttacccgatagcaagggatttctctggcttgcaaatgataaaaannnncatatgatattggttatcattatcaatgaaagagataaaaccatgttgcaacgtacgctgggcagtggctggggagtgttgctgccgggatttctgattgcagggctgatgtatgcggatttatcgccggatcagtggcggattgtcattctgatgggattagtattgacgccggtgatgctgtatcacaaacagttgcggcattacattttgctaccatcgtgcctggcgcttattgctggcatcatgctgatgataatgaatttgaatcagggatgaaaaacnngagagaacaagaaaggaagtaaagataattggtgcgaggggggggacttgaacccccacgtccgtaaggacactaacacctgaagctagcgcgtctaccaattccgccaccttcgcataccatcaattcttaaaaagaattgctaccacggaggcgcattctagtggttttcagcttttcgtcaatagttaattatcgcctgatgtgtaattgctggaaaaatgtccatcaggagactaacgtgcaggttttgtaagtcggataaggcgttcacgccgcatccgacacggtattcggcgagataattaacctttcttcgcctggcgggtcataatggcgcgatacaccttgaagcgccctgtttgcgcgatcacttcgtggaagccaaatgtctcatccagcacgtccggataaggcaggaaggcgttcgctacaattcgcagctcgccgccgctattaagatgacgcaccgcaccgcgaatcagcgtttgcgccgcatccaggctggtttgcatcccatcgtggaacggcgggttggagatgatcatatcaaaacgacctttcacctcggaaaagacgttgctggcaaagacttcaccttcaacaccgttggccgcaagtgttgcgcggctggcttctaccgctggcgcagagacatcgcacaaggtgagacgaattttcggcgaatggcgcgcaaaggcaaccgaaagcacgcccgcgccacagccgacatccagcactttacctttcgtgtgcggggttaacgtcgagagcagcaactggctaccgacatccagaccgtcgcggctaaacacgccaggcagcgttttgaccgtcaggccatcgacgctgtattcgccccagaatttatcggcatcaaataccggctgtttttccagacgaccaaaatagaggccacagcgacgggcgctgtcgactttattcaacggcgcataatcagccagcatctgctcggcgctgcgcacgccgctgcggttctcgccaacaacaaaaatatccgtccccaccggaagcagagaaagtaaattcatcaactggaactgggcttccggtttgttcttcggccagtagtaaatcagcgtatcgcaatctgcgacatcatccgccgtggcgaccagactaaaacgggcgttatcccccatctggcggcttaacacctgccaatggtggaattgctgggtatgagcacggctggccgcggtatctaaacgcgcgggcaggtcatcctgtaagtctccggcaaacagaatacggctttgttcgaaatcatcactgtgacgcagcaagacttcacttgccggggtaaatgcagacatggaatgctcctcaattgatactggcggcgattatagccatatgttggcgcggtatcgacgaatttgctatatttgcgcccctgacaacaggagcgattcgctatgacatcccgacgagactggcagttacagcaactgggcattacccagtggtcgctgcgtcgccctggcgcgttgcagggggagattgccattgcgatcccggcacacgtccgtctggtgatggtggcaaacgatcttcccgccctgactgatcctttagtgagcgatgttctgcgcgcattaaccgtcagccccgatcaagtgctgcaactgacgccagaaaaaatcgcgatgctgccgcaaggcagtcgctgcaacagctggcggttgggtactgacgaaccgctatcactggaaggcgctcaggtggcatcaccggcgctcaccgaattacgggcaaacccaacggcacgcgccgcgttatggcaacaaatttgcacatatgaacacgatttcttccctcgaaacgactgatttaccagcggcttaccacattgaacaacgcgcccacgcctttccgtggagtgaaaaaacctttgccagcaaccagggcgagcgttatctcaactttcagttaacgcaaaacggcaaaatggcggcgtttgcgattacgcaagtggtgctggatgaagctacattgttcaatattgcggtcgatcctgactatcagcgtcagggattgggaagggcgctgctggaacatctgatcgacgaactggaaaaacgcggcgtggcgacactatggctggaagtccgtgcctcaaatgctgccgccattgccctgtacgaaagtttaggctttaacgaggcgacgattcgccgcaattactaccccaccacggacggtcgcgaagacgccatcatcatggcgttgccaatcagtatgtaagacaaggtggaataatgaagtgggactggattttctttgatgccgatgaaacgctgtttacctttgactcattcaccggcctgcagcggatgtttcttgattacagcgtcacctttaccgctgaagattttcaggactatcaggccgttaacaagccactgtgggtggattatcaaaacggcgcgatcacttcattacagcttcagcacgggcggtttgagagctgggccgaacggctgaacgtcgagccaggtaaactcaacgaagcctttattaatgcgatggcggaaatctgcacgccgctgccgggcgcggtttctctgcttaacgccattcgtggcaacgccaaaatcggcatcatcaccaacggctttagtgccttgcaacaggtgcgtctggaacgcacgggcctgcgtgattacttcgatttgctggtgatttccgaagaagttggcgttgccaaaccgaataagaaaattttcgattatgcgctggaacaggcgggcaatcctgaccgttcacgcgtgctgatggttggcgacactgccgagtccgatattctcggtggcatcaacgccgggcttgtgacctgctggctgaatgcacaccatcgcgagcaaccagaaggcatcgcgcccacctggaccgtttcttcgttgcacgaactggagcagctcctgtgtaaacactgattgcctcccccccgttgatgggtaaaatagccgcaatttttcgttttcaacaagcgcggcgcgatgccgcttactcaagaagaaagaattatgacgttgtctccttatttgcaagaggtggcgaagcgccgcacttttgccattatttctcacccggacgccggtaagactaccatcaccgagaaggtgctgctgttcggacaggccattcagaccgccggtacagtaaaaggccgtggttccaaccagcacgctaagtcggactggatggagatggaaaagcagcgtgggatctccattactacgtctgtgatgcagtttccgtatcacgattgcctggttaacctgctcgacaccccggggcacgaagacttctcggaagatacctatcgtaccctgacggcggtggactgctgcctgatggttatcgacgccgcaaaaggtgttgaagatcgtacccgtaagctgatggaagttacccgtctgcgcgacacgccgatcctcacctttatgaacaaacttgaccgtgatatccgcgacccgatggaattgctcgatgaagttgagaacgagctgaaaattggctgcgcaccgatcacctggccaattggctgcggcaagctgtttaaaggcgtttaccacctttataaagatgaaacctatctctatcagagcggtaaagggcacaccattcaggaagtccgcattgttaaagggctgaataacccggatctcgatgctgcggttggtgaagatctggcacagcagctgcgtgacgaactggaactggtgaaaggcgcgtctaacgagttcgacaaagagctgttccttgcgggcgaaatcactccggtattcttcggtactgcgctgggtaacttcggcgttgatcatatgctggatggcctggtggagtgggcgcctgcgccgatgccgcgtcagaccgatacccgtaccgtagaagcgagcgaagataaatttaccggcttcgtatttaaaattcaggccaacatggacccgaaacaccgcgaccgcgtggcgtttatgcgtgtggtgtccggtaaatatgaaaaaggcatgaagctgcgccaggtgcgcactgcgaaagatgtggtgatctccgacgcgctgacctttatggcgggtgaccgttcgcacgttgaagaagcgtatccgggcgatatcctcggcctgcacaaccacggcaccattcagatcggcgacacctttacccagggtgagatgatgaagttcaccggtattccgaacttcgcaccagaactgttccgtcgtatccgcctgaaagatccgctgaagcaaaaacagctgctcaaagggctggtacagctttccgaagagggcgcggtgcaggtgttccgtccaatctccaacaacgatctgatcgttggtgcggttggtgtgctgcagtttgatgtggtggtagcgcgcctgaagagcgaatacaacgttgaagcagtgtatgagtcagtcaacgttgccactgcccgctgggtagaatgtgcagacgcgaagaaattcgaagagttcaagcgtaagaacgaaagccaactggcgcttgatggcggcgataacctcgcttacatcgctaccagcatggtcaacctgcgcctggcacaggaacgttatccggacgttcagttccaccagacccgcgagcattaattcttgcctccagggcgcggtagccgctgcgccctgtcaatttcccttccttattagccgcttacggaatgttcttaaaacattcacttttgcttatgttttcgctgatatcccgagcggtttcaaaattgtgatctatatttaacaaagtgatgacatttctgacggcgttaaataccgttcaatgcgtagatatcagtatctaaagccgtcgattgtcattctaccgatattaataactgattcagaggctgtaatggtcgttattcatcactcatcgcttttgtgatggcgaccattgacttctgtagagggtgaagtctctccctattcagcaatgcaacctcgtgttgccaggctcaaattacgagcaaacatacaggaataaatcgatgactatgacaagactgaagatttcgaaaactctgctggctgtaatgttgacctctgccgtcgcgaccggctctgcctacgcggaaaacaacgcgcagactaccaatgaaagcgcagggcaaaaagtcgatagctctatgaataaagtcggtaatttcatggatgacagcgccatcaccgcgaaagtgaaggcggcgctggtggatcatgacaacatcaagagcaccgatatctctgtcaaaaccgatcaaaaagtcgtgaccctgagcggtttcgttgaaagccaggcccaggccgaagaggcagtgaaagtggcgaaaggtgttgaaggggtgacctctgtcagcgacaaactgcacgttcgcgacgctaaagaaggctctgtgaagggctacgcgggtgacaccgccaccaccagtgaaatcaaagccaaattgctggcggacnnnntcgtcccttcccgtcatgtgaaagttgaaaccaccgatggcgtggttcagctctctggtaccgtagattctcaggcacaaagtgaccgtgctgaaagtatcgccaaagcggtagatggtgtgaaaagcgnnnnnnatgatctgaaaactaagtaattcgtcgtaattcgtcctcccgaactttgtcgggaggcgcgatgtgcaccacactaaaaatatcgcattgagtgattttcacgctcatatcaagcggtgacattaactatggtaaaggagacgcttatgtttcgttggggcatcatatttctggttatcgcgttaatcgccgccgcacttgggtttggtggtctggccggtaccgctgcaggcgcagctaaaattgtctttgtcgtcgggattattctgttcctggtgagtttgttcatgggccgaaaacgaccctagatttcagaccattaagaaaattttatccaaagccagtccagcggactggcttttgcggttttagcgaataataaattgcgttactttgtcattctttcacaacaaaaacaggaaggcagaggtggggcagcgaatacctgtaacgcttggtaatattgcgccgttgtcgctaaggccgttccagcctggacgaatagctctggtgtgcgaaggcggcggacagcgtggaattttcacggctggcgtgctggatgagtttatgcgcgcgcagtttaatcctttcgatctttatctcggcacatctgccggggcgcagaacctctcggcgtatatctgcaatcagcccggttacgcgcgcaaagtcatcatgcgctataccacaaaacgcgaatttttcgatccattgcgctttgtccgtggaggaaatcttatcgatctcgactggctggtggaggccaccgcaagccagatgccgttgcaaatggataccgccgcgcggttgtttgacagcggcaaatcgttttatatgtgcgcctgtcgtcaggatgactacgcgccgaattactttttaccaaccaaacaaaactggctggatgtgattcgcgcctccagtgcgatacctggcttttatcgtagcggagtgtcgctggaaggcattaactacctggatggcgggatcagtgatgcgattccggttaaagaggcggcaaggcagggcgctaaaacgttggtcgtcatccgcactgtgccgtcacaaatgtactacacgccgcagtggttcaaacgcatggaacgctggctgggtgacagtagcctgcagccgctggtcaatctggtgcagcatcatgaaaccagctatcgtgacattcagcaatttattgagaaaccaccgggcaagctgcggatattcgaaatttatccgccgaagccattacatagtatcgcgcttggcagtcggattccggcgctgcgtgaagactataaacttgggcgtttatgcggtcgttatttcctcgccacggttggcaagctattaactgaaaaagcgccgcttacccgccatctggtgccagtggtgacgccggaatcgattgtcattccgcctgcgccagtcgccaacgatacgctggttaccgaagtgagcgacgctccgcaggcgaacgacccgacatttaacaatgaggatctggcttgatttgccgttttatcgacacccactgccattttgatttcccgccttttattggcgatgaagaggccagcctgcaacgcgcggcacaagcgggcgtaggcaagatcattgttccggcaaccgaggcggaaaattttgcccgcgtgcaggcgttagcggaaaattatcaaccgctgtatgccgcattgggcttgcatcctggtatgttggaaaaacatagcgatgtgtctcttgatcagctacagcaggcgctggaaaggcgtccggcgaaggtggtggcggtgggggagatcggtctggatctcttcggcgacgatccgcaatttgagaggcagcagtggtttctcgacgaacaactgaaactggcgaaacgctacgatctgccggtgatcctgcattcacggcgcacacacgacaaactggcgatgcatcttaaacgccacgatttatcgcgcactggcgtggttcacggtttttccggcagcctgcaacaggccgagcggtttgtacagctgggctacaaaatcggcgtaggcggtactatcacctatccacgcgccagtaaaacccgcgttgtcatcgcaaaattaccgctggcatcgttgttgctggaaaccgacgcgccggatatgccgctcaacggttttcaggggcagcctaaccgcccggaacaggctgcgcgggtgtttgacgtgctttgcgagttgcgcccggaaccagaagatgagattgccgaagtgttgcttaataacangtnncggtgtttaacgttcgtgggtagtttgccnttngtaggcagcatccggcagtcggcgcataatgcctgatgcgacgcttaacgcgtcttatcatgcntacaggtttgtgccgaaccgtaggccggataaggcgttcacgccgcatccggcagttggcgcacaatgcctgatgcgacgcttgacgcgtcttatcaggcctacaagtctgtgccgaaccgtaggtcgtatccggcatgtcacaaatacagcgccggaaatattaaccggctcaccccgcgctcccgtaacgcatcagccaacggctcaacgtcttccggcgtggcgctcgcccagctttgcgcctcgccatacacgccgtgggcatgaaacgcgttcaggcgtaccggaacatcgccgactcccttgataaacgccgccagttcttcgatgtgttgcaaataatccacttggccagggattaccagcaaacgcagttccgccagcttaccgcgctctgccagcaaacagatgctgcgcttaatctgctgattatcgcgtccggttaattgctgatgacattcgctcccccacgctttgagatcgagcattgcgccgtcgcacaccgggagcaatttttcccagccggtttcgctcaacataccgttactgtccaccaggcaggtgaggtggcgcagttgcggatcgtttttgatagcagtaaacagcgccactacaaacggcagttgggtcgtggcttcgccgccactcaccgttatcccttcgataaacagcactgctttgcggacatggctaagcacctcatccacgctcatggattgcgccattggcgtggcatgttgcggacacctcttcaggcaggtatcacattgctcgcagaccacagcgttccacaccactttgccgtcaacaatctgcaacgcctgatgcggacactgtggcacgcactccccacagtcattgcaacgtcccatcgtccacggattgtgacagtttttgcagcgcanattgcagccctgcaaaaacagagccagacgactgcctggcccgtcaacgcaggagaaggggataatcttactgactaaagcgcatctgctgttcatggcttatcacgcgcggctggcgttccagaatacgagtgttgcgtgcggcttcttcgcccagccaggtggtgttggtgcgtgaaccttcggcgcgatatttttctaaatccgacaaacgcaccatataaccggtaacgcgaaccagatcgttaccgctgacattggcggtaaattcacgcattccggctttaaaggcaccgaggcaaagctgtaccaacgcctgcgggttacgtttgatggtttcgtcgagcgtcagaatgtcgctgatgccagaataataataagcatgatgcgnnnnnnnagtttgcanatgggtgatcggatctggctcatcgccatacggcaaacgcgcgcccggcgtggtgccgatatcggaactgatccccgactgtgcgtgtaacatggcgcgtttttgccagccatatttcacgggggtattggcgacaaactccgccagctgtgcactgatgcgataacctacttcatttgcggcggcttctttaccgtagcgcgcggcaatcccttctttttcacacagcaagttaaccgcttccgccagcccatacatgccaaacattggcacaaaacgttcagggttaatcagcccttctttcaccaggaagntattctcaaagaagtgtgattgttgatagaggaattcacaccgcgcatcgatgatggcgatctgctgctggcagtagtgcggtagagtgcgcgtaaagaagtcatccagcgattcgctgcgctcggcaatggctttcaggttaaggcgtaccagcgtgctgccaccacccgccagcggcagtgagttgtaacagctcacaatcccgtagcccccttttgtgaaaattttatcatgcaccggaccgttggcgatgtgcggtttgctacattcacagatgttcttcgccacttccagcagcaggtcatcaggggtgatttcaggatcgtagataaaggtcaggttcggtgaaacctgcttcaaatctgcgtctgcacgtaagatcgcgcgggtaatgggcgaatcagacgggccgatattggcgtgcataaaggcgtctggcagggttctgtcgaggtaacgccagaaacgttttattcgaacatcgatctcgtcttgtgttagaattataacatacggttgcaacaacgcatccagttgccccaggtagaccggcatcgatgtgaccgacggtacgtggtggtaaagaatggtcagcagagagagtgcgtcatcaagatctttcgcgccttccagctccagccattcggaaccgttcgccagaaaacgggcgtaatcgggtaagacatagcgcggtttgtacggcgcatgaccttcaaacatatcgcagattacaccttcatccagcgcgcggcgggcttcggcaggaagctgtgggtaaggcagattgttttctgcttccagtgccagaaaatggcgcttctgctccgggctaagcactgggctggtgacaatttgctggcaacgttgttgcagtgcattttcatgagaagtgggcatcttcttttccttttatgccgaaggtgatgcgccattgtaagaagtttcgtgatgttcactttgatcctgatgcgtttgccaccactgacgcattcatttgaaagtgaattatttgaaccagatcgcattatagtgatgcaaacttgtaagtagatttccttaattgtgatgtatatcgaagtgtgttgcggagtagatgttagaatactaacaaactcgcaaggtgaattttattggcgacaagccaggagaatgaaatgactgatctgaaagcaagcagcctgcgtgcactgaaattgatggacctgaccaccctgaatgacgacgacaccgacgagaaagtaattgctctgtgtcatcaggccaaaactccggtcggcaataccgccgctatctgtatctatcctcgctttatcccgattgctcgcaaaacactgaaagagcagggcaccccggaaatccgtattgctacggtaaccaacttcccacacggtaacgacgacatcgaaatcgcgctggcagaaacccgtgcggcaatcgcctacggtgctgatgaagttgacgttgtgttcccgtaccgcgcgctgatggcgggtaacgagcaggttggttttgacctggtgaaagcctgtaaagaggcttgcgcggcagcgaatgtactgctgaaagtgatcatcgaaaccggcgaactgaaagacgaagcgctgatccgtaaagcgtctgaaatctccatcaaagcgggtgcggacttcatcaaaacctctaccggtaaagtggctgtgaacgcgacgccggaaagcgnnngcatcatgatggaagtgatccgtgatatgggcgtagaaaaaaccgttggtttcaaaccggcgggcggcgtgcgtactgcggaagatgcgcagaaatatctcgccatcgcagatgaactgttcggtgctgactgggctgatgcgcgtcactaccgctttggtgcttccagcctgctggcaagcctgctganagcgctgggtcacggcgacggtaagagcgccagcagctactaagtaagatgctttacgcctgatgcgctgcgcttatcaggcctacgagacgtatctacccgtaggccggataaggcgtagacgcatccggcaaaagccgcctcatactcttttcctcgggaggttaccttgtttctcgcacaagaaattattcgtaaaaaacgtgatggtcatgcgctgagcgatgaagaaattcgtttctttatcaacggtattcgcgacaacactatctccgaagggcagattgccgccctcgcgatgaccattttcttccacgatatgacaatgcctgagcgtgtctcgctgaccatggcgatgcgagattcaggaaccgttctcgactggaaaagcctgcatctgaatggcccgattgttgataaacactccaccggtggcgtcggcgatgtgacttcgctgatgttggggccgatggtcgcagcctgcggcggctatattccgatgatctctggtcgcggcctcggtcatactggcggtacgctcgacaaactggaatccatccctggcttcgacattttcccggatgacaaccgtttccgcgaaattattaaagacgtcggcgtggcgattatcggtcagaccagctcactggctccggcggataaacgtttctacgcgacccgtgatattaccgcaaccgtggactccatcccgctgatcactgcctcgatcctggcgaagaaactggcggaaggtctggacgcgctggtgatggacgtgaaagtgggtagcggcgcgtttatgccgacctacgaactctctgaagcccttgccgaagcgattgttggcgtggctaacggcgcaggcgtgcgcaccaccgcactgctcaccgacatgaatcaggtgctggcctccagtgccggtaacgcggttgaagtacgtgaagcggtgcagttcctgacgggtgaatatcgtaacccgcgtctgtttgatgtcacgatggcgctgtgtgtggagatgcttatctccggcaaactggcgaaagatgacgccgaagcgcgcgcgaaattgcaggcggtgctggacaacggtaaagcggcagaagtctttggtcgtatggtagcggcacaaaaaggcccgaccgacttcgttgagaactacgcgaagtatctgccgacagcgatgctgacgaaagcagtctatgctgataccgaaggttttgtcagtgaaatggatacccgcgcgctggggatggcagtggttgcaatgggcggcggacgccgtcaggcatctgacaccatcgattacagcgtcggctttactgatatggcacgtctgggcgaccaggtagacggccagcgtccgctggcggttatccacgcgaaagacgaaaacagctggcaggaagcggcgaaagcggtgaaagcggcaattaaacttgccgataaagcaccggaaagcacaccaactgtctatcgccgtatcagcgaataacggtatactgatctgatcatttaaatttgaagcactgagtacggagaacatatgaaacgtgcatttattatggtgctggactcattcggcatcggcgctacagaagatgcagaacgctttggtgacgtcggggctgacaccctgggtcatatcgcagaagcttgtgccaaaggcgaagctgataacggtcgtaaaggcccgctcaatctgccaaatctgacccgtctggggctggcgaaagcacacgaaggttctaccggtttcattccggcgggaatggacggcaacgctgaagttatcggcgcgtacgcatgggcgcacgaaatgtcatccggtaaagataccccgtctggtcactgggaaattgccggtgtcccggttctgtttgagtggggatatttctccgatcacgaaaacagcttcccgcaagagctgctggataaactggtcgaacgcgctaatctgccgggttacctcggtaactgccactcttccggtacggtcattctggatcaactgggcgaagagcacatgaaaaccggcaagccgattttctatacctccgctgactccgtgttccagattgcctgccatgaagaaactttcggtctggataaactctacgaactgtgcgaaatcgcccgtgaagagctgaccaacggcggctacaatatcggtcgtgttatcgctcgtccgtttatcggcgacaaagccggtaacttccagcgtaccggtaaccgtcacgacctggctgttgagccgccagcaccgaccgtgctgcagaaactggttgatgaaaaacacggccaggtggtttcggtcggtaaaattgcagacatctacgccaactgcggtatcaccaaaaaagtgaaagcgactggcctggacgcgctgtttgacgccaccatcaaagagatgaaagaagcgggtgataacaccatcgtcttcaccaacttcgttgacttcgactcttcctggggccaccgtcgcgacgtcgccggttatgctgcgggtctggaactgttcgaccgccgtctgccggagctgatgtctctgctgcgcgatgacgacatcctgatcctcaccgctgaccacggctgtgatccgacctggaccggtactgaccacacgcgtgaacacattccggtactggtttacggcccgaaagtaaaaccgggctcactgggtcaccgtgaaaccttcgcggatatcggccagactctggcaaaatattttggtacttctgatatggaatatggcaaagccatgttctgatggatttgggcggagcgttgactccgcctttgttatgtcacaaaaaggataaaacaatggctaccccacacattaatgcagaaatgggcgatttcgctgacgtagttttgatgccaggcgacccgctgcgtgcgaagtatattgctgaaactttccttgaagatgcccgtgaagtgaacaacgttcgcggtatgctgggcttcaccggtacttacaaaggccgcaaaatttccgtaatgggtcacggtatgggtatcccgtcctgctccatctacaccaaagaactgatcaccgatttcggcgtgaagaaaattatccgcgtgggttcctgtggcgcagttctgccgcacgtaaaactgcgcgacgtcgttatcggtatgggtgcctgcaccgattccaaagttaaccgcatccgttttaaagaccatgactttgccgctatcgctgacttcgacatggtgcgtaacgcagtagatgcagctaaagcactgggcattgatgctcgcgttggtaacctgttctccgctgacctgttctactctccggacggcgaaatgttcgacgtgatggaaaaatacggcattctcggcgtggaaatggaagcggctggtatctacggcgtggctgcagagtttggcgcgaaagccctgaccatctgcaccgtgtctgaccacatccgcactcacgagcaaaccactgccgctgagcgtcagaccaccttcaacgacatgatcaaaatcgcactggaatccgttctgctgggcgataaagantaattgtgtttcgctgaaaggcgattgtcgtgttaagccggagtgggggactgctccggctttttagtatctattcatcaatagcaactgatttatagatttactattatttttcatatggatagaaaataaaatccattcaagtatctattcacgaatctattcatttatgttcagccgtcatccaggaagggcatatcagcaactctggtggacaaccataaatttctgccattttgcttttgatgtttgagctaagccgttccgtcttttcgatctgttttagagaattaatcgagatacctaacattttacttacttcagcaagcgataatttatgcctgatacgcacggcggctagccaggaaatacgctggctgaacattaaattgataatctcccgttcctggttttccagatcgatcatatttccttccttggatattttaatcagcgagttaccttaccgcccccgctatccacgtcgacaactcccgtagctctttttcctggtccgggaagtcaaccaacagcgcttcgcactcttgttgcagcatatccgcgcggtacaggcagccttgcagtcgcccggnnnnnnnttccagcggcgcggggttgaggctgtcggtaaacacctgggcgcgggtgatatggcctttttcaacgtcgaaatgcagttccacgccnccccagctaaagcgttcatccagcagatgcgagaatgccggagcctgaccgaagttccactcccagctactctggcgggcaaaggtttcggcgaagtttggcaagtctggcgttttgtccggggagatgatttccgcttccacgcgctcgccataatgggcgaaaaaggcctcggttatggcctcgcaaacctgctcatgggggatccccggcagcagctcggtgaggttggtcacgcgggaacgcactgaagtaatgcctttcgccgccagtttctttttatccggattgagatagtttgccaggcggctaaggtcggcattgagcagcaaggtgccgtggtggaagccacgatctttggtttcgcgataggccgatcctgagactttgcggtcgccttcggcggttttcaccaccagatcgttacgtccggacgcttcggcactgacgccgagcgcattcagtgcattgagcacaatcgacgtggagatggttttatcgtactccggcttgccagccataaaggtaaagcaggtattgccgagatcgtggaacaccgcgccgccaccgctactgcgccgcgccaggcggacgttatcttcttccatccgccgggtattacactctttccacgggttctgcgcgcgaccaattactaccgtgtcggcattgcgccagagaaacagaacgcgctgcgtggcgggcatttggcgaaaaatacactcttccaccgccaggttaaaccacgggtcgtaagagtcagagatgagcaggcgtaatgtggacataacgatttcctttcttgtagtaatgggtcactcttttttctcgctttcttcctcttccggcaccggtttgctggcggttaacaggaagggcgattgctgccagcgggtgcgtttaccctgtagcagcgtgcgggtcagcactacgccgattgccagtgagagcagcaacatcaggcgtaaaatgttagtggtgttatccacctgttgggcttcggtggcgagcgtatgggtgtcgagtgtcaggcgcagatagccgagcggtccgtttttcccggcaattggctcgacaatctgctggttaaaatagccgcctgcttttttaccgtcgagcgccagccgatcgcgcacttcgacgctttcgccagaacgtgcgataagatcgccttgttcgtcatacacacccgcgtcgaggatacggctttcatccgttaactgatcgaggatcgcctgaatgcgtttttcatccggtgagtcggtacgcatcagcggtgcaacgttcagcgtcacctgacgcgccagggtgcgggccagttcttccagctgtggattacgctgtcgctggtggttttgactaaaccatgacgccccctgcatcagtgccactaacaaggcaagacagaacaggacaatcactgcccgatgcagccggaatttcagttttgtgcgagccatcttccaccctttgaaaatttgagacttaatgttgccagaagcaatggatacaaggtagcctcatgcgttattttccctgcttcgaacgattttacaggagccttaatgcctaacattacctggtgcgacctgcctgaagatgtctctttatggccgggtctgcctctttcattaagtggtgatgaagtgatgccactggattaccacgcaggtcgtagcggctggctgctgtatggtcgtgggctggataaacagcgtctgacccaataccagagcaaactgggtgcggcgatggtgattgttgccgcctggtgcgtggaagattatcaggtgattcgtctggcaggttcactcaccgcacgggctacacgcctggcccacgaagcgcagctggatgtcgcgccgctgggaaaaatcccgcacctgcgcacgccgggtttgctggtgatggacatggattccaccgccatccagattgaatgtattgatgaaattgccaaactggccggaacgggcgagatggtggcggaagtaaccgaacgggcgatgcgcggcgaactcgattttaccgccagcctgcgcagccgcgtggcgacgctgaaaggcgctgacgccaatattctgcaacaggtgcgtgaaaatctgccgctgatgccaggcttaacgcaactggtgctcaanctggaaacgctgggctggaaagtggcgattgcctccggcggctttactttctttgctgaatacctgcgcgacaagctgcgcctgacagccgtggtagccaatgaantggagatcatggacggtaaatttaccggcaatgtgatcggcgacatcgtagacgcgcagtacaaagcgaaaactctgactcgcctcgcgcaggagtatgaaatcccgctggcgcagaccgtggcgattggcgatggagccaatgacctgccgatgatcaaagcggcagggctggggattgcctaccatgccaagccaaaagtgaatgaaaaggcggaagtcaccatccgtcacgctgacctgatgggggtattctgcatcctctcaggcagcctgaatcanaagtaattgctcgcccgccatcctgcgggcggcacagcattaacgaggtacaccgtggcaaaagctccaaaacgcgcctttgtttgtaatgaatgcggggccgattatccgcnctggcaggggcagtgcagtgcctgtcatgcctggaacaccatcaccgaggtgcgtcttgctgcgtcgcctacggtggcgcgtaacgagcgtctcagcggctatgccggtagcgccggggtggcaaaagtccagaaactctccgatatcagccttgaagagctgccgcgtttttccaccggatttaaagagttcgaccgcgtactaggcggcggcgtggtgccaggaagtgccattctgattggcggtaaccctggtgcggggaaatccacgctgctactgcaaacgctgtgcaaactggcccagcagatgaaaacgctgtatgtcaccggcgaagagtcgctgcaacaggtggcaatgcgcgctcatcgccttggcctgccgactgacaatctcaatatgttgtcggaaaccagcatcgaacagatctgcctgattgccgaagaagagcaaccgaagctgatggtaattgactcgatccaggtgatgcatatggcggatgtacagtcatcgcctggtagcgtggcgcaggtgcgtgaaacggcggcttatttgacacgcttcgccaaaacgcgcggtgtggcgattgtcatggtggggcacgtaaccaaagatggttcgctggctggcccgaaagtgctggaacactgtatcgactgttcggtgcttttggatggcgatgccgactcccgttttcgcaccttgcgcagccataaaaaccgcttcggcgcggtgaatgagctgggcgtcttcgcgatgaccgaacaggggctgcgtgaagtcagcaacccttcggcaattttcttaagtcgcggagatgaagtgacctccggcagctccgtgatggtggtgtgggaaggaacgcgtccgttgctggtggagattcaggcgctggtcgatcactcgatgatggcgaatccgcgccgcgtggcagtggggctggaacaaaaccgtctggcaatcctgctggctgtcttgcaccgtcacggtggtctgcaaatggccgatcaggatgtgtttgtgaacgtggtcggcggcgtaaaggtaaccgaaaccagcgccgacttagcgttactgctggcgatggtttccagcctgcgtgacagaccgctaccgcaggatctggtggtgtttggtgaagtcgggctggcaggggagatccgcccggtgcccagcggtcaggaacgaatctctgaagcggcgaaacacggttttcgccgggcgattgttccggcggctaacgtaccgaaaaaagcgccggaagggatgcagatttttggcgttaaaaaactctccgacgcgcttagcgtgttcgacgacttataatgagaaatacggagggagatatgtcgtcatttgattacctgaaaactgccatcaagcaacagggctgcacgctacagcaggtagctgatgccagcggtatgaccaaagggtatttaagccagttactgaatgccaaaatcaaaagccccagcgcgcaaaagctggaggcgttgcaccgttttttggggcttgagtttccccggcagaagaaaacgatcggtgtcgtattcggtaagttctacccactgcataccggacatatctaccttatccagcgcgcctgtagccaggttgacgagctgcatatcattatgggttttgacgatacccgtgaccgcgcgttgttcgaagacagtgccatgtcgcagcagccgaccgtgccggatcgtctgcgctggttattgcaaacttttaaatatcagaaaaatattcgcattcatgctttcaacgaagagggcatggagccgtatccgcacggctgggatgtgtggagcaacggtatcaaaaagtttatggctgaaaaggggatccagccggatctgatctacacctcggaagaagccgatgcgccacagtatatggaacatctggggatcgagacggtgctggtcgatccgaaacgtacctttatgagtatcagcggtgcgcagatccgcgaaaacccgttccgctactgggaatatattcctaccgaagtgaagccgttttttgtgcgtaccgtggcgatccttggcggcgagtcgagcggtaaatccaccctggtaaacaaacttgccaatatcttcaacaccaccagtgcgtgggaatatggccgcgattatgtcttttcacacctcggcggtgatgagatcgcattgcagtattctgactacgataaaatcgcgctgggccacgctcaatacattgattttgcggtgaaatatgccaataaagtggcatttatcgataccgattttgtcaccactcaggcgttctgcaaaaagtacgaagggcgggaacatccgttcgtgcaggcgctgattgatgaataccgtttcgatctggtgatcctgctggagaacaacacgccgtgggtggcggatggtttacgcagcctcggcagttcggtggatcgtaaagagttccagaatctgctggtggagatgctggaagagaacaatatcgaatttgtgcgggttgaagaggaagattacgacagccgtttcctgcgctgcgtggagctggtgcgggagatgatgggggagcagagataaccgtgatgaaactgctcaaaggcgaggtataaaatgagtttttttgatgagttgaaaacctctctggaagaggctgtcgagattaaacaaggtttgaaaaaacctgcacgggtggcccgccacgaaattgaggatgctaaggctgttgtagaccggaaaaggtgttcacgccgcatccggcattcggtgctcaatgcctgatgcgacgcttaccgcgtcttatcaggcctacagttttacaacgtattgaaattgctggttttgtaggccggataaggcgttcgcgccgcatccggcattttacgcattacttcgcaatacgcttgtacttgatacgcttcggctccagcgcgtctgcgcccagcgtgcgtttcttgtactcttcgtactcggtaaagttaccttcgaagaactcaactttaccttcatcctggtaatccagaatgtgcgtggcgatacggtcgaggaaccaacggtcgtgcgagataaccatcgcacagcccgggaactccagcagggcgttttccagcgcnnncagggtttcgatatccaggtcgttggttggttcgtcgagcagcagcatgttgccgccaacctgcagcagcttcgccagatgcagacgaccgcgctcaccaccggagagttcaccaacgcgtttaccctgatcaacccctttaaagttaaagcggccaacgtaggcgcggcttggcatctcggtgttgccgatcttcatgatatccagcccgccggaaacttcttcccaaacggttttgctgttatccattgagtcacggaactgatcaaccgacgccagtttcaccgtttcacccaaagtgatggtgccgctgtccggctgttcctgaccagagatcatacggaacagggtcgatttacccgcaccgttcggaccgatgatcccgacgatcgctcctttcgggatcgagaagctcaggtcatcaatcagcagacgatcgccataggatttacgcaggttgctgacttccagcactttatcgcccagacgcggtccaggtggaataaacagttcgttggtttcgttacgtttctgatattcggtgctgttcagttcttcaaagcgtgccagacgtgctttacctttcgactggcggcctttagttccctgacgtacccactccagctctttctcgatcgacttacgacgcgccgcttcttgtgaagcttcctgcgccagacgctgatctttctgctccagccaggaggagtagttaccttcccacggaataccttcaccgcggtcaagttcgaggatccagcccgcaacgttatcgaggaagtaacggtcgtgggtaatcgccaccacggtgccttcgaagtcgtgcaggaagcgttccagccaggccacggattcggcatccaggtggttggtcggttcgtcgagcagcagcatgtctggtttttccagcagcaggcggcacaacgccacgcgacgacgctcaccaccggagaggttagcgattttcgcgtcccagtccggcagacgtagcgcatccgccgcacgctccagctgtacgttcagattatgaccgtcgtgagcctgaatgatctcttccagacggccttgttcagcggccagcttgtcaaaatcggcatccggatcggcgtacagcgcatacacttcatccaggcgtttcagggcgttaaccacttctgaaaccgcttcttcaatggactcacgtacggtgtgttccgggttcagctgcggttcctgcggcagataaccaatcttgatgtctggctgcggacgcgcttcaccttcgatgtctttatcaatgcccgccataatgcgcagcagggtggacttacccgcgccgttcagacccaggacaccaatttttgccccagggaagaaactcagagagatgtttttcaaaatatgacgtttcggcggaacaactttgccgacacgatgcatggtataaacgaattgagccacgttggacttcgcctctatgtttatcgtgatgatgagttttcaaaggcgaagtgtagcctttttccccgcctaatcccagccggtcgatcaccctcgcagtaaaagtaaaaaagtgtccgtaacgtggcgtaaacggcaatgactggttagcataaatctattacgcggcatgacgctgcattgatgtatttacacttagaggatgcgcttgtggaaaaagccaaacaagttacctggcggctgttggctgccggtgtctgtctgctgacggtcagcagcgtggcgcgagccgactcactggatgagcagcgtagtcgttacgcgcaaatcaagcaggcctgggataatcgacaaatggatgtggtcgaacaaatgatgcctggactgaaggattatccgctttatccctacctggaataccgccagatcaccgatgacctgatgaatcaaccggcggtgacggtcactaactttgttcgcgctaaccccacgcttcctcccgctcgcacgctgcaatctcgtttcgtcaatgaactggcgcggcgtgaagactggcgtggcctgttagcctttagcccggaaaagcccggaactaccgaagcacaatgtaattactactatgcgaaatggaacaccgggcagagtgaagaagcctggcaaggggcgaaagagctgtggctaaccggcaagagccagcctaacgcctgtgacaagttatttagcgtctggcgtgcgtcaggtaaacaagatccgctggcgtatttagagcgtatccgtctggcgatgaaagcgggtaacactggcctggtaacagtgctggcagggcagatgcctgccgattaccagactatcgcctcggcaatcatttcactggcgaacaaccccaatacggtactgaccttcgcgcgtacaaccggagcgaccgattttacccgtcaaatggcggcggtggcgtttgccagtgtggcgcggcaggatgctgaaaatgcacggctgatgatcccatcgcttgcccaggcgcagcagcttaatgaagatcagattcaggagctgcgcgatatcgtcgcctggcgtttgatgggcaacgatgtcaccgacgagcaggcgaaatggcgcgatgacgccattatgcgctcgcaatctacttcgcttattgaacgccgtgtgcgaatggcgcttggcactggcgatcgtcgcggcctgaatacctggctggcgcgtctgcctatggaagcgaaagagaaagatgaatggcgttactggcaggcggatttattgctggaacgcggacgtgaagctgaagcaaaagagattttgcatcaactcatgcaacagcgtggtttctacccgatggttgctgcacaacgcatcggcgaagagtatgagctgaagattgataaagcgccgcagaatgttgacagcgccctgactcaggggccggagatggcgcgcgtgcgcgagttgatgtactggaatctcgataacaccgcgcgtagcgagtgggccaatctggtgaagagcaagtcaaaaacagagcaggctcaactggcgcggtatgctttcaacaaccaatggtgggatcttagcgttcaggcaacgatcgccgggaagctttgggatcatctggaagagcgattcccgctggcttacaacgatcttttcaaacgttacaccagtgggaaggagatcccgcaaagctatgcgatggcgattgcccgtcaggagagcgcctggaatccgaaagtgaaatcaccggtaggggccagcggcctgatgcagattatgccgggcacggcgacccatacggtgaagatgttctctattcctggttatagcagccctgggcaattgctggatccggaaacgaatatcaacattggcaccagttacctgcaatatgtttatcagcaatttggtaataaccgtattttctcctcagcagcttataacgccggacctggacgggtgcgaacctggcttggcaacagcgccgggcgtatcgacgctgtggcatttgtcgagagtattccgttctccgagacgcgcggttatgtgaagaacgtgctggcttatgacgcttactaccgctatttcatgggggataaaccgacgttgatgagcgccacggaatggggacgtcgttactgatccgcacgtttatgatatgctatcgtactctttagcgagtacaaccgggggaggcattttgcttcccccgctaacaatggcgacatattatggcccaacaatcaccctattcagcagcgatggcagaacagcgtcaccaggagtggttacgttttgtcgacctgcttaagaatgcctaccaaaacgatctccatttaccgttgttaaacctgatgctgacgccagatgagcgcgaagcgttggggactcgcgtgcgtattgtcgaagagctgttgcgcggcgaaatgagccagcgtgagttaaaaaatgaactcggcgcaggcatcgcgacgattacgcgtggatctaacagcctgaaagccgcgcccgtggagctgcgccagtggctggaagaggtgttgctgaaaagcgattgattttgtaggcctgataagacgtggcgcatcaggcatcgtgcaccgaatgccggatgcggcgtgaacgccttatccgtcctacaaatacccgtaatttcaatatgtttggtaggcatgataagacgcggcagcgtcgcatcaggcgcttaatacaccgcattatgaaacggactcagcgccaggatcaccgcctggtgatagacgctggcgcgagtgagtttcccggcggtaaacacgccgatcgccccttccttacgaccaatctcatcaataccggtataacgcgacatcacgggaccaagcgcctcaccttcacgtactttttccaatatcaccgcaggcaacggcaaagttgccgaacgcgcctcgccgcgctgggtggtgttttcaatcaccacccaactgaaagtgctgtcgccatcaatgccagcttcaatcgccacccaaaaatcagcctctggaagtaaacggcgggcattggctacccggtttcgtgcgccagcgcgcgtttcctcactgccaaagggctgttccggtacaccgctctcgacggcaatggatgcaatatggcaggatccttcgccgaagatctcgtgaaatgcctgcagaatggcctgaattttagcgggattggtggtcgcacagacaacttggtgcataatcagcattactcagaaaattaacgttacagcagtatacggaaaaaaagcatgttacaggtatacctagtccgccacggtgaaacgcagtggaacnccgagcgacgtattcagggccagtctgacagcccgctgaccgccaaaggtgancaacangcgatgnnnnnggcgacgcgtgccaaagagcttggcattacgcatatcatcagtagcgatttaggacgcacccggcgtacggcggaaatcatcgcccaggcctgcggctgtgacatcatctttgattctcgcctgcgtgaattaaacatgggtgtgctggaaaaaagacatatcgattctctgaccgaagaagaagagaactggcgtcggcagctggtcaatggcaccgttgatgggcgtattcctgaaggcgagtcaatgcaggagctcagcgatcgcgtcaatgcggcactggaatcttgccgggacttaccgcagggaagccgaccgctgctggtgagccatggtattgcactgggatgtctggtgagtacgattctcggattaccagcatgggcagagcgccgcttacgtctgcgtaactgttctatttcgcgcgtggattatcaggaaagcctgtggctggcgtctggctgggtcgttgaaaccgcaggggacatctcgcatctggacgcccctgcattagatgagctgcagcgttaacggcggataggaatcagcagttcacagcgcagattaattgggcgatctcccgctttggcgtcttctgccgggtagtatcgctcaatatcctgacctttacggcgcgtcaggttgagcattggcatgcacgttccgtataccgtcaggataaactcctgcacgccggttcccagaccttcataggtaaacatcacatattcgccgccctgcagcatcaccggatgccccgtcagtacatagccatctgcctgatcctgggctaacgcggtggtatagaatacctcttgttcgtcgtctttatcctgactcggacgcgtttcattcaggccgtagagcactggcggaatggtcggcgcgttgccgagaaaatcgtgccagaactgataacgcatttcatggcggaaatcagagatttgctccagcgaacaggagtagctctgggtaacaccaatcagcggcgtatcttccagggtgacaaatttatgctctggcatagtgaattcacccagacgcagcggcgggcgaataccaaaggcgctccattcaggagaacggcggtaaagtgcaggagtctgggcaaactgcttcttgaatgcgcgggtaaatgtctgttgagagtcgaagcggtattgcagcgcgatgtccagaatcggacgcgcagtcaggcgtagtgcgaccgccgatttcgacaaacgacgagcacgaatatacgcgccaatagcatggccagtgacatctttaaacattctctgtaagtgccacttggaataacctgctttcgccgctacattgtcgagcgacaggggctgatccagatgaccttccagccagattaaaaggtcgcgaataatgccggcctgatccataaaatatcctcatcctttcaacaacgagcacctgacatcaggtaattggataatagcattttttgctgttttagcattcagtgtttttttcttagtagagtatgttttaggtcttgacggaaataaaagtattgagattttgttcttaatcaatatgttatttaccgtgacgaactaattgctcgtgtaatagataaaaatggtaacaatatgaaatacaagcatttgatcctgtctttaagcctgataatgctggggccattggctcatgcagaagagattggttcggtcgacaccgtatttaaaatgatcggcccggatcacaaaattgttgtggaagcctttgacgatcccgatgtgaaaaatgtcacctgttatgtgagccgggcgaaaacaggtggtattaaagggggattgggtctggcggaagatacctccgatgcggctatttcttgtcagcaagtcgggccgattgaactgtcggatcgtattaaaaacggcaaagctcagggcgaggtagtattcaaaaaacgcacgtccctggtctttaagtcgttacaggtcgtgcgcttttatgacgccaaacgcaacgcgctcgcttatctggcttactccgacaaagttgtagaaggttcgccgaaaaacgcgattagcgcggttcctgtcatgccgtggcgacaataacagaggcgatttatgcaacgggaaacggtctggttagtggaagatgagcaagggatagccgacacgctggtctacatgttgcagcaggaaggttttgccgtcgaggtctttgagcgaggcttgccggtgctggataaagctcgccagcaggttcccgatgtcatgattctcgacgttggtttgcctgatatcagtggctttgaattgtgccgccagttactggcgctccatccggcgttacctgtactgttcctgacggcccgaagtgaagaggtcgatcgcctgcttgggctggaaattggcgctgacgactatgtggctaaaccgttttcaccccgcgaagtgtgcgccagggtgnnnnccttgctgcgtcgggtgaagaagttctcgacgccgtctcccgtcatccgtattggtcattttgaattgaatgaacccgcggcgcagatcagctggtttgacacgccattaacgctgacgcggtatgagtttttattgctgaagacgttactcaagtcgccaggccgcgtctggtcccgccagcaactgatggatatcgtgtgggaagatgcgcaggacacctacgatcgcaccgtctatacccacattaaaacgctgcgtgccaagctgcgcgccatcaaccccgatctttcaccgattaatactcatcgcggcatgggatacagcctgaggagcctgtaatgcgtatcggcatgcggttgttgctgggctattttttactggtggcggtggcggcctggttcgtactggctatttttgtcaaagaagttaaaccgggcgtgcgaagagcaacggaggggacgctgatcgacaccgcaacgttgctggcggagctggcgcgtcccgatttgctctctggggacccaacgcatgggcaactggcgcaggcgtttaatcagctacaacatcgcccgtttcgcgctaatatcggtggcattaacaaagtgcgcaatgaatatcatgtctatatgaccgatgcgcagggcaaagtattgttcgattcggcaaataaagccgttgggcaggattattcgcgctggaatgacgtctggctaacgttgcgtggtcagtatggtgcgcgcagcacgttgcaaaatcctgccgatcccgaaagttcggtgatgtatgttgccgcgccgattatggacggctcgcggcttattggcgttttgagcgtaggcaaaccgaacgcggcgatggctccggtcattaancgcagcgagcggcgaattttatgggccagcgccattttgctggggattgcactggtgattggcgcangcatggtttggtggatcaaccgctccattgcccggctcactcgctatgccgattccgtcactgacaataagcccgttcctcttcctgaactcggcagtagcgagttgcgtaagcttgcgcaggcgctggaaagtatgcgcgtgaagctggaagggaaaaactatattgagcagtatgtttatgcgttaacccatgagctaaaaagcccactggcggcgattcgtggcgcggcggaaattttacgcgaaggtccgccaccggaagtggtggctcgttttaccgacaacattctgacgcaaaatgcgcgtatgcaggcattggtagaaacgttactacgccaggcaagactggagaatcgtcaggaagtcgttctgactgctgttgatgtggcggcattatttcgccgcgtcagcgaagcgcgcaccgtgcagttggcagaaaaaaacatcactttgcatgttatgcctactgaggttaacgttgctgctgaaccggcgttactggagcaggcgctggggaatttactggataacgccatcgattttacccccaagagcggtcgcataacgctaagcgccgaagtggatcaggaacacgtcgcccttaaggtgctggataccggtagtggtattcctgactacgcgctgtcacgtatttttgaacgcttttactctttgccgcgtgcaaatgggcaaaaaagcagcggtctggggttggcgtttgtcagtgaggtcgcccgtttgtttaacggcgaagtcacgctgcgcaacgtgcaggaaggtggcgtgctggcctcgcttcggcttcaccgtcacttcacatagcttcaaattcttcccacatagccttcgtatcctgctgccattgcaaaggagaagactatgttgaaatcccccctgttntggaaaatgaccaccctgtttggtgcagtattgctgttgttgattccgataatgctgattcggcaggtgattgtcgaacgtgccgattaccgtagcgatgtggaagatgcgattcgccaaagtaccagcgggccgcaaaaactcgttgggcctcttatcgctattcctgtgaccgagctttatacggtgcaggaagangataaaaccgtggagcggaaacgaagttttatccatttttggttacctgagtcattgatggttgatggcaatcagaacgtggaagaacgcaagatagggatttataccggtcaggtctggcacagtgatttaacgctaaaagccgatttcgatgtttcgcgtcttagcgaactcgacgcgccaaatatcacctttggcaagccatttattgtgattagcgtcggggatgcgcgtggtattggtgtggtgaaagcgcctgaagttaacggaacggcgctgactattgaacccggcatcgggttagagcaaggcgggcagggcgtgcatatccctttacccgaaggggactggcggaagcagaacctgaagctgaatatggcactgaatttaagcggtaccggcgatctttctgtggtgcctgcggggcgtaatagcgaaatgaccttaaccagcaactggccgcatcccagttttttaggtgattttctaccagccaaacgggaagttagtgagtcaggttttcaggcgcaatggcaaagcagctggtttgctaataatctcggtgagcgttttgcttcaggcaatgataccggctgggaaaacttccccgcgtttagcgtcgcagtgacgacgcccgccgatcaataccaattaactgaccgggcgactaagtatgccattctgctgattgcgctgacttttatggcgttctttgtttttgaaacgctcaccgcgcaacgtttacacccaatgcaatatttgctggtggggctttcattggtgatgttttatttgctcttgctggcgctttctgaacataccggttttaccgtggcatggataatcgccagtctgattggggcgttaatgaacggtatttatttgcaggcggtattgaaaggttggcgcaacagcatgttgtttaccctcgcgctgttgttgctggatggtgtgatgtggggactcctcaactctgccgatagcgcgctgttgttgggaaccagtgtgctggtggtggcgctggccggcatgatgtttgtgactcgtaatatcgactggtatgcgttttcactgccgaaaatgaaagccagtaaagaagttacaacggacgatgaattacgtatctggaaataaggttgaaaaataaaaacggcgctaaaannnnnnnnnttttttgacggtggtaaagccgattaatcttccagatcaccgcagaagcgataaccttcaccgtgaatggtggcgatgatttccggcgtatccggcgtagattcgaaatgtttacgaatacggcggatcgtcacgtctacagtacggtcgtgcggtttcagctcacggccggtcattttcttcagcagttcagcacgggactgaattttgcctgggttttcacagaagtgaagcatggcgcggaactcactgcgcggcagcttgtactgctcgccatcagggccgatcaaagaacggctgttgatgtccagttcccaaccattgaacttgtagctttcaacgctacgacgttcttcgctgacagtacccagattcatggtacgggacagcaggttgcgtgcacgaatcgtcagttcacgcgggttgaacggtttggtgatgtagtcatctgcaccgatttcgaggccgagaattttatcgacttcgttgtcacggccagtcaggaacatcaacgcaacattcgcctgctcgcgcagttcacgcgctaacagaagaccgttcttacccggcagattgatatccatgatcaccaggttgatgtcatattcagagaggatctgatgcatttccgcgccatctgtcgcttcgaaaacatcatagccttccgcttcgaaaatacttttcaacgtgttgcgtgttaccaactcgtcttcaacgataagaatgtgcggggtctgcatgtttgctacctaaattgccaactaaatcgaaacaggaagtacaaaagtccctgacctgcctgatgcatgctgcaaattaacatgatcggcgtaacatgactaaagtacgtaattgcgttcttgatgcactttccatcaacgtcaacaacatcattagcttggtcgtgggtactttccctcaggacccgacagtgtcaaaaacggctgtcatcctaaccattttaacagcaacataacaggctaagaggggccggacacccaataaaactacgcttcgttgacatatatcaagttcaattgtagcacgttaacagtttgatgaaatcatcgtatctaaatgctagctttcgtcacattanntnnnnaatccaactagnngcatcatacaactaataaacgtggtgaatccaattgtcgagattnnnnnnnnnnnnaattatcctaagtaaacagaaggatatgtagcattttttaacaattaaaccgttagtacagtcaggaaatagtttagccttttttaagctaagtaaagggctttttctgcgacttacgttaagaatttgnnnnttcgcnccgcgtaataagttgacagtgatcaccctgttcgcggtcatttggtcaagaagagtggcaatatgcgtataacgattattctggtcgcacccgccagagcagaaaatattggggcagcggcgcgggcaatgaaaacgatggggtttagcgaactgcggattgtcgatagtcaggcacacctggagccagccacccgctgggtcgcacatggatctggtgatattattgataatattannnntttcccgacactggctgaatcgttacacgatgtcgatttcactgtcgccaccactgcgcgcagnngggcgaaatatcattactacgctacgccagtagaactggtgccgctgttagaggaaaaatcttcatggatgagccatgccgcgctggtgtttggtcgcgaagattccgggctgactaacgaagagttagcgttggctgacgttcttactggtgtgccgatggtggcggattatccttcgctcaatctggggcaggcggtgatggtctattgctatcaattagcaacattaatacaacaaccgacgaaaagtgacacaacggcagaccaacatcaactgcaagctttacgcgaacgagccatggcattgctgacgactctggcagtggcagatgacataaaactggtcgactggttacaacaacgcctggggcttttagagcaacgagacacggcaatgttgcaccgtttgctgcatgatattgaaaaaaatatcaccaaataaaaaangccttagtaagtattnnn
